(19) United States
(12) Patent Application Publication
(10) Pub. No.: US 2026/0109938 A1
(43) Pub. Date: Apr. 23, 2026

(54) GENETIC CODES

(71) Applicant: United Kingdom Research and Innovation, Swindon, Wiltshire (GB)

(72) Inventors: Jason CHIN, Swindon, Wiltshire (GB); Jerome ZURCHER, Swindon, Wiltshire (GB); Wesley ROBERTSON, Swindon, Wiltshire (GB)

(21) Appl. No.: 18/993,813

(22) PCT Filed: Jul. 19, 2023
(86) PCT No.: PCT/EP2023/070049

§ 371 Date: Jan. 13, 2025

(30) Foreign Application Priority Data
Jul. 19, 2022 (GB) 2210580.3
Oct. 18, 2022 (GB) 2217789.3

(51) Int. Cl. C12N 1/20; C12N 1/36; C12N 15/70; C12P 1/04; C12R 1/19

(52) U.S. Cl. CPC C12N 1/20; C12N 1/36; C12N 15/70; C12P 1/04; C12R 2001/19

(57) ABSTRACT

Provided are cells that are resistant to mobile genetic elements or horizontal gene transfer, and methods for obtaining said cells. Also provided are methods for preventing the horizontal transfer of genetic information between a mobile genetic element and a first cell, cells making use of new genetic codons schemes and related subject matter, kits comprising mutually orthogonal cells, and mobile genetic elements. Also provided are methods of altering the susceptibility of a gene to mutations that alter the encoded amino acid sequence, methods for evolving or improving a protein, and methods for rendering a target gene more resistant to mutation. Additionally provided are uses of the cells for making polymers and methods comprising using the cells for making polymers.

### CROSS-REFERENCE TO RELATED APPLICATIONS

[0001] This application is a national phase filing under 35 U.S.C. § 371 of International PCT Application No. PCT/EP2023/070049, filed Jul. 19, 2023, which claims the benefit of priority to United Kingdom Application No. 2210580.3 filed on Jul. 19, 2022, and United Kingdom Application No. 2217789.3 filed on Oct. 18, 2022, the content of each of which is hereby incorporated by reference in its entirety.

### INCORPORATION BY REFERENCE OF SEQUENCE LISTING

[0002] The instant application contains a Sequence Listing which has been submitted electronically in XML format and is hereby incorporated by reference in its entirety. Said XML copy, created on Dec. 5, 2025 is named 51689-019001_Sequence_Listing_12_5_25 and is 23,934,723 bytes in size.

### FIELD OF THE INVENTION

[0003] Provided herein are cells that are resistant to mobile genetic elements or horizontal gene transfer, and methods for obtaining said cells. Also provided are methods for preventing the horizontal transfer of genetic information between a mobile genetic element and a cell, cells making use of new genetic codons schemes and related subject matter, kits comprising mutually orthogonal cells, and mobile genetic elements. Also provided are methods of altering the susceptibility of a gene to mutations that alter the encoded amino acid sequence, methods for evolving or improving a protein, and methods for rendering a target gene more resistant to mutation. Additionally provided are uses of the cells for making polymers and methods comprising using the cells for making polymers.

### BACKGROUND OF THE INVENTION

[0004] The near-universal genetic code defines the correspondence between codons in genes and amino acids in proteins (1, 2). Because all forms of life use essentially the same genetic code, evolutionary innovation can be shared—via horizontal gene transfer (HGT)—between organisms (3, 4). The sharing of genetic information between organisms is a major driver of evolution in prokaryotes and some eukaryotes (5).

[0005] However, the near-universal genetic code is also a liability for organisms; mobile genetic elements (or selfish genetic elements)—including transposons, viruses and plasmids—exploit the universality of the code, and co-opt the host cell's machinery to read their genes and propagate themselves at the expense of host organisms. There is a clear tension between maintaining a common genetic code, to allow the acquisition of beneficial innovation through HGT, and excluding selfish genetic elements that exploit the common code for their own ends (3, 6).

[0006] Several deviations from the standard genetic code have been documented in mitochondria and chloroplasts, and the vast majority of characterized code reassignments involve stop codons (7-9). Known sense codon reassignments in the nuclear genome are rare. The ‘CTG yeast’ decode the CUG codon (which encodes leucine in the standard code) primarily as serine (97%, with the remaining 3% still assigned to leucine) (10). Viruses for the CTG yeasts are essentially unknown, suggesting that sense codon reassignment may protect against viruses (11). There are no experimentally validated examples of sense codon reassignment in bacteria, though recent work provides computational evidence for reassignment of arginine codons in bacilli (12).

[0007] Genome synthesis (13-15) and editing provides the opportunity to rewrite the genetic code of organisms (15-17). We synthesized a 4 Mb Escherichia coli genome in which we compressed the genetic code by removing all annotated occurrences of the TCG and TCA sense codons that encode serine, and the TAG stop codon; this created a new strain, Syn61 (15). We then further evolved the strain and deleted the genes for the tRNAs that decode TCG and TCA codons (serU, tRNA_{CGA}^{Ser} and serT, tRNA_{UGA}^{Ser}) and the gene for RF-1 (prfA) that terminates protein synthesis at the TAG stop codon. The resulting organism, Syn61Δ3, cannot read all the codons in the near universal genetic code and therefore cannot read horizontally transferred genes containing the codons deleted from its genome, as exemplified by resistance to a range of bacteriophage (18).

[0008] It has been widely hypothesized that refactoring the structure of the genetic code, through the reassignment of sense codons to distinct canonical amino acids, would create organisms with new properties, and could create a genetic firewall to limit the escape of genetic information from synthetic organisms to natural organisms (4, 6, 19, 20). However, these hypotheses remain untested.

### SUMMARY OF THE INVENTION

[0009] In the experiments disclosed herein, the genetic code of a synthetic E. coli strain is refactored to exhibit semantic- and functional orthogonality with respect to the universal genetic code, allowing for the creation of orthogonal horizontal gene transfer systems.

[0010] In an aspect, there is provided a cell that: comprises a genome wherein at least a first type of sense codon has been recoded such that a first endogenous tRNA is dispensable; does not express the first endogenous tRNA; expresses a first modified tRNA capable of decoding the first type of sense codon, wherein the first modified tRNA is charged with a first amino acid that is not a naturally cognate amino acid for the first type of sense codon; and comprises a gene required for viability, wherein the gene comprises at least one occurrence of the first type of sense codon and the cell is viable when the first type of sense codon in said gene is decoded as the first amino acid.

[0011] In another aspect, there is provided a cell that: comprises a genome wherein a first type of sense codon and a second type of sense codon have been recoded such that a first endogenous tRNA and a second endogenous tRNA are dispensable; does not express the first endogenous tRNA and the second endogenous tRNA; expresses a first anticodon-swapped tRNA derived from a naturally occurring first parent tRNA, wherein the first anticodon-swapped tRNA is charged with a first amino acid and the first parent tRNA is an isoacceptor for the first amino acid, and wherein the first amino acid is not a naturally cognate amino acid for the first type of sense codon; and expresses a second anticodon-swapped tRNA derived from a naturally occurring second parent tRNA, wherein the second anticodon-swapped tRNA is charged with a second amino acid and the second parent tRNA is an isoacceptor for the second amino acid, and wherein the second amino acid is not a naturally cognate amino acid for the second type of sense codon; wherein the first and/or second modified tRNA cannot decode any type of codon apart from the first type of sense codon and/or the second type of sense codon.

[0012] In another aspect, there is provided a cell that: comprises a genome wherein a first type of sense codon and a second type of sense codon have been recoded such that a first endogenous tRNA and a second endogenous tRNA are dispensable; does not express the first endogenous tRNA and the second endogenous tRNA; expresses a first modified tRNA capable of decoding the first type of sense codon, wherein the first modified tRNA is charged with a first amino acid that is not a naturally cognate amino acid for the first type of sense codon; and expresses a second modified tRNA capable of decoding the second type of sense codon, wherein the second modified tRNA is charged with a second amino acid that is not a naturally cognate amino acid for the second type of sense codon; wherein: i) the first amino acid is alanine and the second amino acid is alanine; ii) the first amino acid is alanine and the second amino acid is histidine; iii) the first amino acid is alanine and the second amino acid is leucine; iv) the first amino acid is alanine and the second amino acid is proline; v) the first amino acid is histidine and the second amino acid is alanine; vi) the first amino acid is histidine and the second amino acid is histidine; vii) the first amino acid is histidine and the second amino acid is leucine; viii) the first amino acid is histidine and the second amino acid is proline; ix) the first amino acid is leucine and the second amino acid is alanine; x) the first amino acid is leucine and the second amino acid is histidine; xi) the first amino acid is leucine and the second amino acid is proline; xii) the first amino acid is proline and the second amino acid is alanine; xiii) the first amino acid is proline and the second amino acid is histidine; xiv) the first amino acid is proline and the second amino acid is leucine; or xv) the first amino acid is proline and the second amino acid is proline.

[0013] In another aspect, there is provided a cell with increased resistance to horizontal gene transfer or mobile genetic elements, wherein the cell has been modified to reassign at least one type of sense codon to an amino acid not associated with the sense codon in the canonical genetic code, and the cell comprises a gene required for viability that is functional when decoded according to the reassigned genetic code and is not functional when decoded according to the canonical genetic code.

[0014] In another aspect, there is provided a method of increasing the resistance of a cell to mobile genetic elements or horizontal gene transfer, wherein the cell has been modified to reassign at least one type of sense codon to an amino acid not associated with the sense codon in the canonical genetic code, said method comprising: modifying a gene required for viability to include at least one occurrence of the reassigned sense codon, wherein the cell is viable if the reassigned sense codon in said gene is decoded as the reassigned amino acid, and the cell is not viable if the reassigned sense codon in said gene is decoded according to the canonical genetic code, or wherein the reassigned sense codon in said gene at least partially contributes to a loss of viability if decoded according to the canonical genetic code.

[0015] In another aspect, there is provided a kit comprising a first cell recoded according to a first orthogonal coding scheme and a second cell recoded according to a second orthogonal coding scheme, where the first and second coding schemes are mutually orthogonal.

[0016] In another aspect, there is provided a mobile genetic element recoded according to an orthogonal coding scheme.

[0017] In another aspect, there is provided a method of preventing the horizontal transfer of genetic information between a mobile genetic element and a first cell, the method comprising incubating the mobile genetic element and the first cell, wherein the mobile genetic element is a mobile genetic element as disclosed herein, and the first cell includes tRNAs that decode codons according to the canonical genetic code or according to a coding scheme that is orthogonal to that of the mobile genetic element.

[0018] In another aspect, there is provided a method of altering susceptibility of a gene to mutations that alter the encoded amino acid sequence, the method comprising: i) identifying a target gene; and ii) incubating a cell comprising the target gene, wherein the cell comprises a tRNA capable of decoding at least one sense codon to a reassigned amino acid.

[0019] In an additional aspect, there is provided use of a cell disclosed herein for the production of a polymer. In an embodiment, there is provided a method for making a polymer, the method comprising: culturing a cell disclosed herein, providing the cell with a nucleic acid sequence encoding the polymer, and obtaining the polymer.

### BRIEF DESCRIPTION OF THE DRAWINGS

[0020] FIG. 1. Compressed genetic codes are non-orthogonal. (A) The relationship between the TCG and TCA codons in genes, the decoders for these codons in cells with wild-type (WT) decoding and Syn61Δ3 decoding (Δ3), and the corresponding protein sequence synthesized. The anticodon of the tRNAs that read TCG or TCA codons is indicated (decoder). The amino acid (aa) used by the tRNA is indicated. Grey for a decoder indicates that the tRNA is loaded with serine. Grey for a codon indicates that the codon is within a non-codon compressed gene and its decoding as serine will make the correct protein sequence. Pink for a decoder/amino acid pair indicates that the tRNA is deleted. Pink for a codon indicates the codon in absent from the gene, as the gene has been designed with codon compression. (B) Functional assessment of wild type (SpecR WT) and codon compressed spectinomycin resistance (recSpecR (ΔTCG, TCA)) genes in cells that use the full complement of tRNAs to decode all the codons in the reading frame (Syn61 WT, left panel) and cells in which the tRNAs that decode TCG and TCA codons (Syn61Δ3, right panel) have been deleted. Cells were spotted on Agar plates in the presence or absence of spectinomycin and incubated overnight. Growth of cells in the presence of spectinomycin indicates that the indicated SpecR gene is functional in the indicated strain. (C, D) Predicted protein synthesis and horizontal gene transfer outcomes from mobile genetic elements and recipient cells with the indicated decoders, and codons in essential genes. (C) A mobile genetic element encoding its genes according to the canonical genetic code, where TCG and TCA encode serine, cannot be horizontally transferred to Syn61Δ3 cells that have no decoders for TCG and TCA codons. Translation will stall at TCG and TCA codons, and no full-length protein will be synthesized from the essential genes within the mobile genetic element that contain TCG and TCA codons. (D) A mobile genetic element encoding its genes according to the canonical genetic code that also carries a gene for a tRNA decoding TCG and TCA codons can be horizontally transferred to Syn61Δ3 cells. The tRNA encoded on the mobile genetic element can rescue decoding of TCG and TCA codons within essential genes in the mobile genetic element to make the correct protein. (E) Transfer of and tRNA encoding mobile genetic elements through conjugation; Colony count indicates successful transconjugants received from ˜10⁶ cells. A WT mobile genetic element (F WT) can be transferred into cells with a WT translational machinery (Syn61 WT) but not into cells that lack tRNAs decoding TCG and TCA (Syn61Δ3). A WT mobile genetic element that encodes for a tRNA decoding TCG and TCA codons as serine (F (WT+serT)) can be transferred to both Syn61 WT and Syn61Δ3.

[0021] FIG. 2. Sense codon reassignment generates new genetic codes. (A) Total synthesis of a codon compressed genome followed by tRNA and release factor deletion yielded Syn61Δ3. The discovery of tRNAs that direct the incorporation of distinct natural amino codes. (B) Isoacceptor tRNAs for the indicated amino acids with anticodons altered to the Watson-Crick complement of TCG or TCA codons were introduced into cells in the indicated pair-wise combinations. We read out the identity of the amino acid incorporated into each codon using GFP genes with TCG or TCA codons at position 3 and electrospray ionization mass spectrometry (ESIMS). When pairs of isoacceptors for distinct amino acids were used, each codon led to the specific incorporation of the amino acid attached to the Watson-Crick paired isoacceptor. The secondary peak measured in the proline incorporations results from incomplete methionine cleave at the N-terminus. A complete list of found and expected masses are provided in Data File S1. (C) Sixteen new genetic codes in which TCG and TCA codons are reassigned to Ala, His, Leu and Pro.

[0022] FIG. 3. Semantic orthogonality in genetic systems. (A) The relationship between the TCG and TCA codons in genes, the decoders for these codons in cells with wild-type (WT) decoding and decoding by tRNA^{Ala}_{CGA}, tRNA^{His}_{UGA} in Syn61Δ3, and the corresponding protein sequence synthesized. The anticodon of the tRNAs that read TCG or TCA codons is indicated (decoder). The amino acid (aa) used by the tRNA is indicated. Grey for a codon indicates that its decoding as serine will make the correct protein sequence. Yellow for a codon indicates that its decoding as alanine will make the correct protein sequence. Green for a codon indicates that its decoding as histidine will make the correct protein sequence. (B) Functional assessment of SpecR WT (which uses the natural genetic code) and O-SpecR (TCG-Ala, TCA-His) which is codons compressed according the Syn61 recoding scheme and has Ala codons replaced with TCG and His codons replaced with TCA. The genes are read in cells with a WT translational machinery (Syn61 WT), and cells where TCG is decoded as Ala and TCA is decoded as His (Syn61Δ3 (tRNA_{CGA}^{Ala}, tRNA_{UGA}^{His})). Cells were spotted on Agar plates in the presence or absence of spectinomycin and incubated overnight. Growth of cells in the presence of spectinomycin indicates that the indicated SpecR gene is functional in the indicated strain.

[0023] FIG. 4. Orthogonal and mutually orthogonal horizontal gene transfer systems. (A) Horizontal gene transfer between the two bacterial strains in prohibited (dashed grey arrows), while horizontal gene transfer among cells that share a common genetic code is possible (solid arrows). (B) Orthogonal horizontal transfer of mobile genetic elements. Colony count indicates the number of transconjugants received from ˜10⁶ donor cells bearing the indicated mobile genetic element. A WT mobile genetic element (F WT) was transferred into cells with WT translational machinery (Syn61 WT) but not into cells where TCG is reassigned to alanine and TCA is reassigned to histidine (Syn61Δ3 (tRNA_{CGA}^{Ala}, tRNA_{UGA}^{His})). An orthogonal mobile genetic element (OF1) was transferred into Syn61Δ3 (tRNA_{CGA}^{Ala}, tRNA_{UGA}^{His}) but not into Syn61 WT. (C) Mutually orthogonal horizontal genetic systems. Colony count indicates successful transconjugants received from ˜10⁶ donor cells bearing the indicated mobile genetic element. The orthogonal mobile genetic element (O-F2) was exclusively be transferred into cells where TCG is reassigned to histidine and TCA is reassigned to alanine (Syn61Δ3 (tRNA_{CGA}^{His}, tRNA_{UGA}^{Ala})); O-F2 was not transferred into Syn61Δ3 (tRNA_{CGA}^{Ala}, tRNA_{UGA}^{His}) or Syn61 WT. Neither F WT nor O-F1 can be transferred to (Syn61Δ3 (tRNA_{CGA}^{His}, tRNA_{IGA}^{Ala}). (D) extends the experiments illustrated in (C) and demonstrates similar specificities for O-F3 and O-F4.

[0024] FIG. 5. Orthogonal code-locking blocks invading codes. (A, B) Predicted protein synthesis and horizontal gene transfer outcomes from mobile genetic elements and recipient cells with the indicated decoders, and codons in essential genes. (A) Transfer of a WT mobile genetic element that encodes for a tRNA decoding TCG and TCA codons as Ser into a cell where TCG is reassigned to Ala and TCA is reassigned to His. Essential genes in the WT mobile genetic element, containing TCG and TCA codons, will be mis-synthesized, with each TCG and TCA codon in the gene being stochastically decoded as Ser or His/Ala. This is predicted to attenuate horizontal gene transfer. (B) Transfer of a WT mobile genetic element that encodes for a tRNA decoding TCG and TCA codons as serine into a cell where TCG is reassigned to Ala and TCA is reassigned to His. Essential genes in the WT mobile genetic element, containing TCG and TCA codons, will be mis-synthesized, with each TCG and TCA codon in the gene being stochastically decoded as Ser or His/Ala. In addition, essential genes in the host cell—in which TCG is used to encode Ala and TCA is used to encode His—will be mis-synthesized. This is predicted to ablate horizontal gene transfer. (C) Horizontal gene transfer is ablated in cells that use orthogonal genetic codes in essential genes of mobile genetic elements and the recipient cell. F (WT+serT) was used as the mobile genetic element in all experiments. Colony count indicates successful transconjugants received from ˜10⁶ cells. Recipient cells and spectinomycin resistance gene variant (SpecR gene) in the recipient cell is indicated. Correctly reading the indicated SpecR gene, in the recipient cell, is made essential by addition of spectinomycin. (D) T4-like phage encoding a seryl-tRNA_{UGA} infect Syn61Δ3, but not cells bearing orthogonal genetic codes. Plaque count indicates the number of successfully replicating phage obtained from infection with 1.1×10¹⁰ PFU/mL (phage 12) and 7.5×10⁹ PFU/mL (phage 6). Cells contain cognate spectinomycin resistance genes, as in C; all experiments were performed in the presence of spectinomycin.

[0025] FIG. 6 (FIG. S1). Compressed Genetic Codes are non-orthogonal. Functional assessment of wild type (HygR WT) and codon compressed hygromycin resistance (recHygR (ΔTCG, TCA)) genes in cells that use the full complement of tRNAs to decode all the codons in the reading frame (Syn61 WT, left panel) and cells in which the genes for the tRNAs that decode TCG and TCA codons (Syn61Δ3, right panel) have been deleted. Cells were spotted on agar plates in the presence or absence of hygromycin and incubated overnight. Growth of cells in the presence of hygromycin indicates that the given HygR gene is functional in the given strain.

[0026] FIG. 7 (FIG. S2). tRNA import breaks genetic isolation. A WT mobile genetic element (F WT) encoding a chloramphenicol resistance gene and the lux operon, encoding the enzymes for the synthesis of luciferin, was conjugated from Donor cells (Syn61 WT) into Recipient cells (Syn61Δ2: this is a strain derived from Syn61Δ3 where prfA has been reintroduced via lambda red recombination), which contains a pSC101-Hyg plasmid encoding hygromycin resistance, and the pKW20 plasmid (35). After conjugation cells were selected on hygromycin and chloramphenicol containing agar plates so only cells that contain the pSC101 vector and F WT can survive. (A) Chemiluminescent image of selection plate from conjugation assay. The three colonies that survive on selection plates after conjugation luminesce as a result of luciferin production, indicating that they have received F WT. (B) Genotyping of two colonies picked from the selection plate (the third colony did not grow in liquid media). Controls included the Syn61 WT (containing genomically encoded prfA, serT and serU, these cells do not contain the pSC101-Hyg plasmid) and Syn61Δ3 (in which prfA, serT and serU have been deleted from the genome, these cells contain the pSC101-Hyg plasmid). Genotyping for the pSC101-Hyg plasmid confirmed that the clones were recipient cells. Genotyping the prfA locus revealed that both clones that survive selection contained the prfA gene at the endogenous genomic locus. Genotyping the serT locus reveals that both clones carried serT at the endogenous genomic locus. Genotyping the serU locus demonstrated that clones did not carry serU at the endogenous genomic locus. (C) Next generation sequencing (NGS) sequence alignments against reference genomes for the recipient and donor strain. We observed that at the serT locus the sequence of the clones matched the donor reference (no gaps or insertions are observed when aligned against the Syn61 WT sequence; insertions were observed when aligned against Syn61Δ3 sequence). At the serU locus however, the sequence of the clones matched the Syn61Δ3 sequence (insertion observed when aligned against Syn61 WT sequence. No gaps or insertions observed when aligned against the Syn61Δ3 sequence). Vertical coloured lines indicate a mismatch between the sequencing read and the reference. Grey shows paired end reads, where pairs are correctly oriented and positioned with respect to each other. Reads displayed in green/red indicate anomalous paired end reads, where pairs are misoriented or mispositioned with respect to each other. (D) Sequencing allowed us to define the origin of the genomic sequence for each clone; Syn61Δ3 (and therefore Syn61Δ2) contains mutations that result from its evolution from Syn61 WT, these mutations act as watermarks that allowed us to map whether DNA sequences are derived from the donor (Syn61 WT) or recipient (Syn61Δ2) genomes. We find that most of the genome is that of the recipient. However, over a stretch of ˜400 kb multiple segments of Donor DNA were integrated into the recipient genome. The pattern of genomic DNA integration was unique for each sequenced clone, but both clones contained the serT locus.

[0027] FIG. 8 (FIG. S3). Isoacceptor tRNAs with altered anticodons are active and specific. (A) Production of sfGFP-His6 from sfGFP3TCG or sfGFP3TCA gene in Syn61Δ3 cells harbouring the indicated isoacceptor tRNA chimera with a CGA or UGA anticodon. serT and serU decode both TCG and TCA codons, while the chimeric isoacceptors show specificity for codons with Watson-Crick complementarity at all three bases of the codon-anticodon interaction. The level of GFP produced by all chimeric tRNAs on their Watson Crick complement codon, for all but proM with a UGA anticodon, is at least comparable to the GFP produced from a WT GFP gene without TCG or TCA codon; this suggests that the chimeric isoacceptor tRNAs are efficient and specific. The protein yield for WT sfGFP is 17 mg/L. sfGFP-3-TCG/TCA expression is comparable to WT sfGFP for cognate decoders. (B) Chimeric isoacceptors retain specificity for aminoacylation by the amino acid specified by the parent isoacceptor. The identity of the amino acids incorporated in response to TCG or TCA at position 3 of sfGFP, in cells containing the chimeric tRNAs with an anticodon that was the Watson-Crick complement of the codon at position 3 of sfGFP, was confirmed by electrospray ionization mass spectrometry (ESI-MS). Only masses corresponding to the correct amino acid were detected. The secondary peak measured in the proline incorporations results from incomplete methionine cleave at the N-terminus. Expected and actual masses for expression of sfGFP3TCG; Expected mass sfGFP-3-Ser: 27755.13 Da, actual mass: 27756.00 Da. Expected mass sfGFP-3-Ala: 27739.13 Da, actual mass: 27740.60 Da. Expected mass sfGFP-3-His: 27805.19 Da, actual mass: 27806.20 Da. Expected mass sfGFP-3-Leu: 27781.21 Da, actual mass: 27782.00 Da. Expected mass sfGFP-3-Pro: 27765.17 Da, actual mass: 27765.40 Da. Expected and actual massed for expression of sfGFP3TCA; Expected mass sfGFP-3-Ser: 27755.13 Da, actual mass: 27756.00 Da. Expected mass sfGFP-3-Ala: 27739.13 Da, actual mass: 27741.20 Da. Expected mass sfGFP-3-His: 27805.19 Da, actual mass: 27805.60 Da. Expected mass sfGFP-3-Leu: 27781.21 Da, actual mass: 27782.00 Da. Expected mass sfGFP-3-Pro: 27765.17 Da, actual mass: 27765.20 Da.

[0028] FIG. 9 (FIG. S4). Semantic orthogonality in genetic systems. (A) Functional assessment of (SpecR WT), written in the canonical genetic code, and codon reassigned spectinomycin resistance (O-SpecR (His-TCG, Ala-TCA), O-SpecR (Ala-TCG, Leu-TCA), O-SpecR (Leu-TCG, Leu-TCA), O-SpecR (Pro-TCG, Leu-TCA), O-SpecR (Ala-TCG, Ala-TCA), O-SpecR (Ala-TCG, Pro-TCA)) genes in cells with a canonical decoding (Syn61 WT), and cells where TCG and TCA codons have been reassigned according to the appropriate code (Syn61Δ3 (tRNACGAHis, tRNAUGAAla), Syn61Δ3 (tRNACGAAla, tRNAUGALeu), Syn61Δ3 (tRNACGALeu, tRNAUGALeu), Syn61Δ3 (tRNACGAPro, tRNAUGALeu), Syn61Δ3 (tRNACGAAla, tRNAUGAAla), Syn61Δ3 (tRNACGAAla, tRNAUGAPro)). Cells were spotted on Agar plates in the presence or absence of spectinomycin and incubated overnight. Growth of cells in the presence of spectinomycin indicates that the indicated SpecR gene is functional in the indicated strain. (B) Functional assessment of HygR WT (which uses the natural genetic code) and O-HygR (TCG-Ala, TCA-His) which is codons compressed according the Syn61 recoding scheme and has Ala codons replaced with TCG and His codons replaced with TCA. The genes are read in cells with a WT translational machinery (Syn61 WT), and cells where TCG is decoded as Ala and TCA is decoded as His (Syn61Δ3 (tRNAcGAAla, tRNAuGAHis))

[0029] FIG. 10 (FIG. S5). The mutational landscape of WT and codon compressed genetic codes. Depiction of mutational landscapes for various amino acids in WT and codon compressed genetic codes. Amino acid for which mutational landscape is displayed are highlighted (serine in grey, alanine in yellow, histidine in green, leucine in orange, and proline in blue). Amino acids that are only one point mutation removed from the highlighted amino acid are connected via a line and marked.

[0030] FIG. 11 (FIG. S6). Refactored genetic codes alter the mutational landscape. Depiction of mutational landscapes for the refactored genetic codes created in this work. TCG reassignment is displayed on the left. TCA reassignment is displayed on top. For each code serine and the reassigned amino acids are highlighted. Amino acids that are only one point mutation removed from highlighted amino acids are connected via a line and marked.

[0031] FIG. 12 Raw spectra. (A) Complied mass spectra (pre-deconvolution) for sfGFP-3-TCG measurements (as displayed in FIG. 2B) are shown. The intensity at each mass is displayed as total ion count. (B) Complied mass spectra (pre-deconvolution) for sfGFP-3-TCA measurements (as displayed in FIG. 2B) are shown. The intensity at each mass is displayed as total ion count.

[0032] FIG. 13 The fidelity of TCG TCA decoding by isoacceptor tRNAs at position 11 of ubiquitin. Isoacceptor tRNAs for the indicated amino acids with anticodons altered to the Watson-Crick complement of TCG or TCA codons were introduced into Syn61Δ3 in the indicated pair-wise combinations. We read out the identity of the amino acid incorporated into each codon using ubiquitin genes with either TCG or TCA codons at position 11 and electrospray ionization mass spectrometry (ESI-MS). When pairs of isoacceptors for distinct amino acids were used, each codon led to the specific incorporation of the amino acid attached to the Watson-Crick paired isoacceptor. We calculated the minimum specificities for decoding TCG or TCA codons in the presence of both tRNA_{CGA}^{XXX} and tRNA_{UGA}^{YYY}, where XXX and YYY are distinct amino acids (Methods). We observed apparent incorporation of Ala at TCA in cells that contain tRNA_{CGA}^{Ala} and tRNA_{UGA}^{Leu}; we estimate ≥78.2% Leu incorporation at this codon; this may result in part from misacylation of tRNA_{UGA}^{Leu} and/or from competitive decoding of the TCA codon by tRNA_{CGA}^{Ala}. For all other spectra the specificity of decoding a codon with the correct vs incorrect anticodon ranged from ≥96% to ≥99.8%.

[0033] FIG. 14 Sense codon reassignment does not yield detectable off-target incorporation at TCT codons (A) Isoacceptor tRNAs for the indicated amino acids, with anticodons altered to the Watson-Crick complement of TCG or TCA codons, were introduced into cells in pair-wise combinations, as indicated. We read out the identity of the amino acid incorporated into a TCT codon at position 3 of GFP using electrospray ionization mass spectrometry (ESI-MS). Detected masses in the presence of all isoacceptors pairs correspond to the incorporation of serine at TCT codons. Expected mass for serine 27755.13 Da; alanine: 27739.13 Da; for histidine: 27805.19 Da; for leucine 27781.21 Da; for proline: 27765.17 Da. All measured masses (27754.5±0.5 Da) correspond to incorporation of serine at TCT. The limit of fidelity measurements (Methods) for these spectra range from 97.4% to 99.6%, and we do not observe peaks for incorporating amino acids other than serine. (B) Complied mass spectra (pre-deconvolution) for sfGFP-3-TCT measurements (as displayed in A) are shown. The intensity at each mass is displayed as total ion count.

[0034] FIG. 15 Sense codon reassignment does not yield detectable off-target incorporation at TCC codons (A) Isoacceptor tRNAs for the indicated amino acids, with anticodons altered to the Watson-Crick complement of TCG or TCA codons, were introduced into cells in pair-wise combinations, as indicated. We read out the identity of the amino acid incorporated into a TCC codon at position 3 of GFP using electrospray ionization mass spectrometry (ESI-MS). Detected masses in the presence of all isoacceptors pairs correspond to the incorporation of serine at TCC codons. Expected mass for serine 27755.13 Da; alanine: 27739.13 Da; for histidine: 27805.19 Da; for leucine 27781.21 Da; for proline: 27765.17 Da. All measured massed (27754.5±0.5 Da) correspond to incorporation of serine at TCC. The limit of fidelity measurements (Methods) for these spectra range from 98.0% to 99.5%, and we do not observe peaks for incorporating amino acids other than serine. (B) Complied mass spectra (pre-deconvolution) for sfGFP-3-TCC measurements (as displayed in A) are shown. The intensity at each mass is displayed as total ion count.

[0035] FIG. 16 Raw spectra Ubiquitin (A) Complied mass spectra (pre-deconvolution) for Ub-11-TCG measurements (as displayed in FIG. 13) are shown. The intensity at each mass is displayed as total ion count. (B) Complied mass spectra (pre-deconvolution) for Ub-11-TCA measurements (as displayed in FIG. 13) are shown. The intensity at each mass is displayed as total ion count.

[0036] FIG. 17 MS-MS of amino acids incorporated at position 11 of ubiquitin (A) Tandem mass spectrometry spectra of peptides covering position 11 of the ubiquitin protein, following digestion of ubiquitin protein expressed from Ub-11-TCG gene in the presence of tRNA_{UGA}^{Ser}. y-ions are labelled in red; b-ions in blue. The peptide sequence is displayed at the bottom of each spectrum. Serine (marked with a green asterisk) at position 5 of the peptide confirms correct decoding of the TCG codon in Ub-11-TCG by tRNA_{UGA}^{Ser}. (B) Tandem mass spectrometry spectra of peptides covering position 11 of the ubiquitin protein, following digestion of ubiquitin protein expressed from Ub-11-TCA gene in the presence of tRNA_{UGA}^{Ser}. y-ions are labelled in red; b-ions in blue. The peptide sequence is displayed at the bottom of each spectrum. Serine (marked with a green asterisk) at position 5 of the peptide confirms correct decoding of the TCA codon in Ub-11-TCA by tRNA_{UGA}^{Ser}.

[0037] FIG. 18 MS-MS of amino acids incorporated at position 11 of ubiquitin (A) Tandem mass spectrometry spectra of peptides covering position 11 of the ubiquitin protein, following digestion of ubiquitin protein expressed from Ub-11-TCG gene in the presence of tRNA_{CGA}^{Ala}. y-ions are labelled in red; b-ions in blue. The peptide sequence is displayed at the bottom of each spectrum. Alanine (marked with a green asterisk) at position 5 of the peptide confirms correct decoding of the TCG codon in Ub-11-TCG by tRNA_{CGA}^{Ala}. (B) Tandem mass spectrometry spectra of peptides covering position 11 of the ubiquitin protein, following digestion of ubiquitin protein expressed from Ub-11-TCA gene in the presence of tRNA_{UGA}^{Ala}. y-ions are labelled in red; b-ions in blue. The peptide sequence is displayed at the bottom of each spectrum. Alanine (marked with a green asterisk) at position 5 of the peptide confirms correct decoding of the TCA codon in Ub-11-TCA by tRNA_{UGA}^{Ala}.

[0038] FIG. 19 MS-MS of amino acids incorporated at position 11 of ubiquitin (A) Tandem mass spectrometry spectra of peptides covering position 11 of the ubiquitin protein, following digestion of ubiquitin protein expressed from Ub-11-TCG gene in the presence of tRNA_{CGA}^{His}. y-ions are labelled in red; b-ions in blue. The peptide sequence is displayed at the bottom of each spectrum. Histidine (marked with a green asterisk) at position 5 of the peptide confirms correct decoding of the TCG codon in Ub-11-TCG by tRNA_{CGA}^{His}. (B) Tandem mass spectrometry spectra of peptides covering position 11 of the ubiquitin protein, following digestion of ubiquitin protein expressed from Ub-11-TCA gene in the presence of tRNA_{UGA}^{His}. y-ions are labelled in red; b-ions in blue. The peptide sequence is displayed at the bottom of each spectrum. Histidine (marked with a green asterisk) at position 5 of the peptide confirms correct decoding of the TCA codon in Ub-11-TCA by tRNA_{UGA}^{His}.

[0039] FIG. 20 MS-MS of amino acids incorporated at position 11 of ubiquitin (A) Tandem mass spectrometry spectra of peptides covering position 11 of the ubiquitin protein, following digestion of ubiquitin protein expressed from Ub-11-TCG gene in the presence of tRNA_{CGA}^{Leu}. y-ions are labelled in red; b-ions in blue. The peptide sequence is displayed at the bottom of each spectrum. Leucine (marked with a green asterisk) at position 5 of the peptide confirms correct decoding of the TCG codon in Ub-11-TCG by tRNA_{CGA}^{Leu}. (B) Tandem mass spectrometry spectra of peptides covering position 11 of the ubiquitin protein, following digestion of ubiquitin protein expressed from Ub-11-TCA gene in the presence of tRNA_{UGA}^{Leu}. y-ions are labelled in red; b-ions in blue. The peptide sequence is displayed at the bottom of each spectrum. Leucine (marked with a green asterisk) at position 5 of the peptide confirms correct decoding of the TCA codon in Ub-11-TCA by tRNA_{UGALe}u.

[0040] FIG. 21. MS-MS of amino acids incorporated at position 11 of ubiquitin (A) Tandem mass spectrometry spectra of peptides covering position 11 of the ubiquitin protein, following digestion of ubiquitin protein expressed from Ub-11-TCG gene in the presence of tRNA_{CGA}^{Pro}. y-ions are labelled in red; b-ions in blue. The peptide sequence is displayed at the bottom of each spectrum. Proline (marked with a green asterisk) at position 5 of the peptide confirms correct decoding of the TCG codon in Ub-11-TCG by tRNA_{CGA}^{Pro}. (B) Tandem mass spectrometry spectra of peptides covering position 11 of the ubiquitin protein, following digestion of ubiquitin protein expressed from Ub-11-TCA gene in the presence of tRNA_{UGA}^{Pro}. y-ions are labelled in red; b-ions in blue. The peptide sequence is displayed at the bottom of each spectrum. Proline (marked with a green asterisk) at position 5 of the peptide confirms correct decoding of the TCA codon in Ub-11-TCA by tRNA_{UGA}^{Pro}.

[0041] FIG. 22 Screen of anticodon modified tRNAs (A) We expressed and purified ubiquitin-His6 with a TCG codon at position 11 (Ub-11-TCG-His6) in the presence of the indicated tRNAs with a CGA anticodon; expressions were performed in Syn61Δ3 and purified by Ni-NTA chromatography. To evaluate the amino acid specificity of the anticodon modified tRNAs we performed intact protein mass spectrometry. Expected and measured masses are indicated for each tRNA. The expected masses are for the amino acid of the parent isoacceptor, where the mass differs from this the mass for the closest canonical amino acid incorporation is also shown as an additional expected mass. The following tRNAs incorporated an amino acid distinct from that expected for the parent isoacceptor (or gave results that could not be unambiguously assigned to the amino acid of the parent isoacceptor) and were not considered further: AsnT, CysT, GlnV, LysQ, MetV, MetY, PheU, ValV, ValW. The following tRNAs incorporated the amino acid of the parent isoacceptor: ArgU, ArgX, ArgQ, ArgW, GltU, GlyU, HisR, ProK, ProL, ProM, ThrT, TrpT, TyrV. (B) For a subset of tRNAs that incorporated the amino acid of the parent isoacceptor, we expressed Ub-11-TCG-His6 in the presence of the indicated tRNAs with a CGA anticodon; expressions were performed in Syn61Δ3 and the lysates probed with anti His6 following SDS-PAGE (we replaced ThrT with ThrU). From these experiments we chose ProM and HisR as good candidates for further characterisation. In control experiments without tRNA expression we did not detect ubiquitin from Ub-11-TCG. SerU is a natural TCG decoder and is a positive control.

[0042] FIG. 23. Doubling times Doubling times for Syn61Δ3 in the presence of different pair-wise combinations of anticodon modified tRNAs were measured in 2×YT. The strains were no tRNA (−) or serT (tRNA_{UGA}^{Ser}) were present serve as controls. Most anticodon modified tRNAs lead to no or modest changes in doubling time of Syn61Δ3. To facilitate parallel measurements of doubling times were performed in a 96-well format in 200 uL volumes (Methods). For comparison, Syn61Δ3 (no tRNA (−) control) has a doubling time of 49.77±0.8 min, when grown in a shake flask

[0043] FIG. 24 Mutually orthogonal horizontal gene transfer systems Colony count indicates successful transconjugants received from ˜10⁶ donor cells bearing the indicated mobile genetic element. Mobile genetic elements—(F (WT (TCG-Ser, TCA-Ser)), O-F1 (TCG-Ala, TCA-His), O-F2 (TCG-His, TCA-Ala), O-F3 (TCG-Ala, TCA-Ala), O-F4 (TCG-Ala, TCA-Pro))—were exclusively transferred into cells with the cognate reassignment of TCG and TCA codons (Syn61 WT (tRNA_{CGA}^{Ser}, tRNA_{UGA}^{Ser}), Syn61Δ3 (tRNA_{CGA}^{Ala}, tRNA_{UGA}^{His}), Syn61Δ3 (tRNA_{CGA}^{His}, tRNA_{IGA}^{Ala}), Syn61Δ3 (tRNA_{CGA}^{Ala}, tRNA_{UGA}^{Ala}), Syn61Δ3 (tRNA_{CGA}^{Ala}, tRNA_{UGA}^{Pro})). No transconjugation was observed for non-cognate code/decoder systems.

[0044] FIG. 25 Orthogonal code-locking blocks invading codes Horizontal gene transfer of a WT mobile genetic element (F (WT+serT)) is ablated in cells that use a refactored genetic code in essential genes of mobile genetic elements and the recipient cell. Colony count indicates successful transconjugants received from ˜10⁶ cells. Recipient cells and hygromycin resistance gene variant (HygR gene) in the recipient cells indicated. Correctly reading the indicated HygR gene, in the recipient cell, is made essential by addition of hygromycin.

[0045] FIG. 26 Orthogonal code-locking blocks invading codes Horizontal gene transfer of a WT mobile genetic element (F (WT+serT)) is ablated in cells that use a refactored genetic code in essential genes of mobile genetic elements and the recipient cell. Colony count indicates successful transconjugants received from ˜10⁶ cells. Recipient cells and spectinomycin resistance gene variant (SpecR gene) in the recipient cells indicated. Correctly reading the indicated SpecR gene, in the recipient cell, is made essential by addition of spectinomycin.

[0046] FIG. 27. Whole genome sequencing of purified phage reveals a seryl-tRNA gene (A) We assessed thirty one phage enrichments from environmental samples for their ability to form plaques on a code compressed strain (Syn61Δ3) and a strain with a refactored and locked genetic code (Syn61Δ3 (tRNA_{CGA}^{Ala}, tRNA_{UGA}^{His})O-SpecR (Ala-TCG, His-TCA)) in the presence of spectinomycin. Thirteen of the environmental samples formed plaques on Syn61Δ3, while none of the samples formed plaques on the strain with a refactored genetic code (Methods). Two individual phage (named 6 and 12) were serially purified from single plaques in Syn61WT (as described in the Methods). High coverage NGS enabled de novo genome assembly for these phage. Their genome sizes were 164,924 and 167,593 respectively. Both phage belong to the Tequatrovirus genus (T4-like phage), showing >97% identity with Citrobacter phage ZZ23 (NC_054901) and Escherichia phage U115 (MZ753803) respectively. Both genomes contained a seryl-tRNA gene, encoding ΦtRNA_{UGA}^{Ser}. (B) The predicted secondary structure of the phage encoded seryl-tRNA (ΦtRNA_{UGA}^{Ser}) and serT (endogenous E. coli tRNA_{UGA}^{Ser} gene). All E. coli seryl-aaRS identity elements are present in ΦRNA_{UGA}^{Ser} (bases shown in red), consistent with the viral tRNA being a substrate for E. coli seryl-tRNA synthetase. The sequences shown in the figure are SEQ ID NO: 69 (endogenous E. coli tRNA_{UGA}^{Ser} gene) and SEQ ID NO: 70 (ΦtRNA_{UGA}^{Ser}). (C) Electron-microscopy images of isolated phages 6 and 12. Both phages showed a characteristic Myoviridae morphology, consistent with the phage genome sequences.

[0047] FIG. 28 Providing tRNA_{UGA}^{Ser} from phage 6 and 12 to Syn61Δ3 enables infection by T4 phage We assessed the ability of T4 phage to form plaques in different strains. While T4 forms plaques in Syn61 WT, Syn61Δ3 is resistant to T4 plaque formation due to the absence of tRNAs to decode TCG and TCA codons. T4 plaque formation is rescued in Syn61Δ3 by the expression of either serT (encoding E. coli tRNA_{UGA}^{Ser}) or ΦtRNA_{UGA}^{Ser} that is encoded on the genomes of both phage 12 and phage 06. Cells were infected with ˜10⁶ to ˜10³ PFU/mL.

[0048] FIG. 29 Genetic code refactoring and code locking blocks viral replication (A) Clonal pools of phage 12 and 06 that encode ΦtRNA_{UGA}^{Ser} on their genome form plaques in both Syn61 WT and Syn61Δ3. Various strains with distinct refactored and locked genetic codes show complete ablation of plaque formation. (B) Titration (˜10⁷ to ˜10³ PFU/mL) of phage 6 and 12 on strains with the indicated genetic codes. No plaque formation was observed in strains with refactored and locked genetic codes.

[0049] FIG. 30 Phage replication is a more complex biological function than conjugation. The formation of plaques from T-4 like phage infection is a more complex biological process than the formation of colonies after successful horizontal gene transfer from conjugation. (A) Comparative genome analysis of T-4 like phages (Phage 06 and Phage 12) and the RK2 F plasmid. On the x-axis the size is indicated in kilobases. Positions where a TCA codon occurs are marked with a vertical, yellow line (top). Positions where a TCG codon occurs are marked with a vertical, red line (bottom). (B) Codon usage in mobile genetic elements. On the x-axis the total frequency of target codons (TCA and TCG) is indicated. TCA codon frequency is represented in yellow, TCG codon frequency in red. (C) For the formation of plaques a phage particle first needs to attach to a bacterial cell and inject its DNA into the cytosol. Subsequently, genes from the phage genome are transcribed and translated by the host machinery producing viral proteins. Moreover, the phage genome is replicated inside the cell. Finally, these components need to mature into fully functional phage particles that escape from the cell and infect neighbouring cells. This complex process requires many structural and regulatory proteins to be expressed correctly from the phage genome. (D) For the formation of colonies from recipient cells bearing a horizontally transferred conjugative plasmid, the donor cell first needs to attach to the recipient. Subsequently, the F plasmid is transferred through the mating channel and recircularized inside the recipient cell. The process of attachment, transfer, and recircularization relies exclusively on proteins expressed in the donor cell. Then, proteins are expressed from the conjugative element enabling its replication and segregation during cell division. Division of the recipient cell bearing the transferred plasmid leads to colony formation without further conjugation events.

[0050] FIG. 31 Code-locking ensures stability of refactored genetic codes. (A) Cells were passaged every 12 h and assessed for the presence of the refactored code. While cells with code-locking retained the genetic code in all cases cells demonstrating stability of code refactoring, in cells without code locking the refactored codes are not stable. Cells either contained a codon compressed SpecR resistance gene (not locked: −) or a cognate SpecR gene (SpecR TCG-Ala, TCA-His/SpecR TCG-Leu, TCA-Leu) (locked: +); all experiments were performed in the presence of spectinomycin. (B) Phage encoding a seryl-tRNA_{UGA} infect cells with unstable genetic codes, but not cells with stably refactored codes. Cells from the last point in the time course (A) with and without code-locking were subject to infection with T4-like phages (Phage 06/12). Plaque count indicates the number of successfully replicating phage obtained from infection with ˜5×10⁸ PFU (phage 12) and ˜1×10⁷ PFU (phage 6). Cells either contained a codon compressed SpecR resistance or a cognate SpecR gene (as in (A)); all experiments were performed in the presence of spectinomycin.

[0051] FIG. 32 Structure of major capsid protein gp23. (A) Protein structure of major capsid protein gp23 from T4 phage. There are three serine residues present that are encoded with TCA (highlighted in orange) and therefore subject to ambiguous decoding in cells with refactored genetic codes. (B) Binding interface of major capsid protein gp23; displayed are three subunits of gp23 that are part of a the hexameric capsid subunit. Serine residues encoded by TCA on the central subunit (in grey) are displayed in orange.

[0052] FIG. 33 Phage propagation assay. T4-like phage encoding a seryl-tRNA (tRNA_{UGA}^{Ser}) successfully infect Syn61Δ3 but not cells with a refactored and locked genetic code. The plaque count indicated the number of phage particles in a 7.5 uL volume after 24 h propagation in a culture containing the indicated cells.

[0053] FIG. 34 The effects of code refactoring and code locking on modes of horizontal gene transfer. T4-like phage encoding a seryl-tRNA (tRNA_{UGA}^{Ser}) successfully infect Syn61Δ3 but not cells with a refactored genetic code. Plaque count indicates the number of successfully replicating phage obtained from infection with 1.1×10¹⁰ plaque-forming units (PFU)/ml (phage 12) and 7.5×10⁹ PFU/ml (phage 6).

### DETAILED DESCRIPTION

### Code-Locking

[0054] There is a need to prevent mobile genetic elements, such as viruses, from contaminating cells. For instance, industrial scale fermentation of bacterial for commercial product production can be contaminated by mobile genetic elements, such as viruses. This can cause financial loss and can disrupt vital supply claims. There are existing methods for protecting cells from such contamination (see WO2020/229592 A1 or Robertson et al., Science, 4 Jun. 2021, Vol 372, Issue 6546, pp. 1057-1062, both incorporated herein by reference) but the inventors demonstrate herein that there remains a risk from mobile genetic elements that comprise tRNAs. Attempts have been made to reduce the risk from such mobile genetic elements (see Nyerges et al. “Swapped genetic code blocks viral infections and gene transfer”) but there remains a need for techniques to render cells resistant to mobile genetic elements that comprise tRNAs.

[0055] Provided herein are cells that are “code-locked”. The genome of these cells has been recoded to reduce or remove instances of at least one type of sense codon, which then allows the removal of an endogenous cognate tRNA because it is now dispensable for the cell (see Robertson et al., Science, 4 Jun. 2021, Vol 372, Issue 6546, pp. 1057-106). The inventors discovered that the inclusion of a tRNA specific for the removed sense codon, but charged with an amino acid which with the sense codon would not naturally be associated, reduces but does not ablate the risk of contamination with a mobile genetic element comprising a relevant tRNA (see FIG. 5 of the present disclosure). This has been noted by others (see Nyerges et al.). The inventors have overcome this problem by generating cells that include a gene that is required for viability of the cell, wherein the gene has been recoded so that a sense codon has been reassigned to a different amino acid from that of the canonical genetic code. The inventors have surprisingly found that the inclusion of such a gene reduces or ablates horizontal gene transfer from mobile genetic elements that make use of the canonical genetic code or a genetic code that does not match that of the target cell. The inventors have also found that this approach leads to the maintenance of exogenous tRNAs that have been introduced for code refactoring. Thus, this approach also leads to maintenance of the resistance to horizontal gene transfer or mobile genetic elements.

[0056] Thus, in a first aspect, there is provided a cell that: comprises a genome wherein at least a first type of sense codon has been recoded such that a first endogenous tRNA is dispensable; does not express the first endogenous tRNA; expresses a first modified tRNA capable of decoding the first type of sense codon, wherein the first modified tRNA is charged with a first amino acid that is not a naturally cognate amino acid for the first type of sense codon; and comprises a gene required for viability, wherein the gene comprises at least one occurrence of the first type of sense codon and the cell is viable when the first type of sense codon in said gene is decoded as the first amino acid.

[0057] The cell may have increased resistance to horizontal gene transfer or mobile genetic elements, as discussed in the section below. Hence, in a fourth aspect provided herein is a cell with increased resistance to horizontal gene transfer or mobile genetic elements, wherein the cell has been modified to reassign at least one type of sense codon to an amino acid not associated with the sense codon in the canonical genetic code, and the cell comprises a gene required for viability that is functional when decoded according to the reassigned genetic code and is not functional when decoded according to the canonical genetic code. The gene may be required for viability alone or in combination with other genes.

[0058] As discussed in Example 7, cells that have been modified in the above-mentioned manner exhibit improved maintenance of the resistance to horizontal gene transfer or mobile genetic elements. Thus, the increased resistance may be resistance that is maintained over a longer period of time compared to a cell culture that does not comprise code-locked bacteria.

[0059] The gene required for viability may be an exogenous gene. For instance, the gene may be a gene that is commonly used as a positive selectable marker. In some examples, the gene is an antibiotic resistance gene. Illustrative embodiments include a spectinomycin resistance gene or a hygromycin resistance gene.

[0060] In other examples, the gene required for viability may be an essential gene within the cell's genome. A gene is “essential”, as used herein, if the product of the gene is required for viability of the cell. For instance, if the prevention of expression of a functional form of a protein encoded by a gene would result in non-viability of the cell, then the gene is considered essential.

[0061] The gene required for viability may comprise at least one reassigned codon wherein a mutation of the corresponding residue in the translated product causes a loss of function. In particular, the reassigned codon may be positioned such that the decoding of the codon according to the canonical genetic code results in a loss of function for the product. For instance, if the cell comprises a tRNA capable of decoding a codon normally associated with serine but charged with alanine, and the gene comprises said codon where an alanine would be present in the natural product, the product of the gene may be one that would be non-functional with a serine in said position. The aforementioned examples of particular amino acids are purely illustrative, and any may be used. In particular, any of the reassignment schemes of FIG. 2C. The cell may therefore comprise a gene required for viability, wherein the gene comprises at least one occurrence of the first type of sense codon and the cell is not viable when the first type of sense codon is decoded according to the canonical genetic code.

[0062] The gene required for viability may comprise a plurality of reassigned codons. The plurality of reassigned codons may each, or may cumulatively, be positioned such that product comprising the non-reassigned amino acid (as discussed in the preceding paragraph) would be non-functional. The cell may therefore comprise a gene required for viability, wherein the gene comprises a plurality of occurrences of the first type of sense codon and the cell is not viable when said occurrences are decoded according to the canonical genetic code. The at least one occurrence of the first type of sense codon in the gene required for viability may at least partially contribute to a loss of viability if decoded according to the canonical genetic code, and may contribute to a complete loss of viability in combination with other features, such as other reassigned codons or other types of reassigned codon. In some examples, multiple reassigned codons, potentially of multiple types, may be present within the gene required for viability or multiple genes required for viability may be present. Any individual instance of a reassigned codon may at least partially contribute to a loss of viability if decoded according to the canonical genetic code, and the full loss of viability may be due to an effect of the translation of multiple reassigned codons according to the canonical genetic code.

[0063] The cell of the present disclosure may comprise more than one gene required for viability comprising at least one reassigned codon.

[0064] The cell of the present disclosure may comprise a genome that has been recoded with respect to a second type of sense codon.

[0065] In some embodiments, the genome of the cells is recoded such that a first endogenous tRNA is dispensable and a second endogenous tRNA is dispensable. The cell may not express or comprise the first or second endogenous tRNA. In examples, the cell expresses or comprises a second modified tRNA, which is capable of decoding the second type of sense codon. The second modified tRNA is charged with a second amino acid, and the second amino acid is not a naturally cognate amino acid for the second type of sense codon.

[0066] A gene required for viability may comprise at least one occurrence of the second type of sense codon, wherein cell is viable when the second type of sense codon in said gene is decoded as the second amino acid. This gene may be the same gene required for viability and comprising the first type of sense of codon, or may be a different gene.

[0067] In some examples, the cell is not viable when the second type of sense codon in the gene required for viability is decoded according to the canonical genetic code. The gene may comprise a plurality of occurrences of the second type of sense codon and the cell may not be viable when said occurrences are decoded according to the canonical genetic code. The at least one occurrence of the second type of sense codon in the gene required for viability may at least partially contribute to a loss of viability if decoded according to the canonical genetic code, and may contribute to a complete loss of viability in combination with other features, such as other reassigned codons or other types of reassigned codon. The full loss of viability may be due to an effect of the translation of multiple reassigned codons according to the canonical genetic code.

[0068] The cell may comprise at least one gene required for viability that comprises the first type of sense codon and at least one different gene required for viability that comprises the second type of sense codon. The cell may comprise a gene required for viability that comprises the first and the second types of sense codon. Combinations of genes required for viability, and comprising any combination of the reassigned codons, are also possible.

[0069] The cells of the present disclosure may be viable when the genes are decoded according to the reassigned genetic code and may be non-viable when the genes are decoded at least partially according to the canonical genetic code.

[0070] The modified tRNA is one that is derived from a tRNA, which may be a naturally occurring tRNA, that has been altered such that it is capable of decoding a codon to an amino acid with which the codon is not associated in the canonical genetic code. For instance, the residues of the anticodon of the tRNA may be substituted such that the tRNA has a different codon specify, such tRNAs may be referred to as anticodon-swapped tRNAs. Alternatively, it is possible to charge a tRNA with an amino acid with which it would not be naturally associated, hence providing the capability for the tRNA to decode a codon to an amino acid with which the codon is not associated in the canonical genetic code. The modified tRNAs may also be modified in other ways, for instance additional sequence may be added. The modified tRNAs may be charged with the natural amino acid with which the parent tRNAs are naturally associated.

[0071] The modified tRNA may be derived from a naturally occurring tRNA (which may be referred to as a parent tRNA). For instance, the modified tRNA may be derived from a tRNA that is endogenous to the cell in question. The modified tRNA may be derived from an isoacceptor tRNA for a particular amino acid within the cell. For instance, if the cell is E. coli the modified tRNA may be derived from an E. coli tRNA that is an isoacceptor for the first or second amino acid. The modified tRNA may be derived from a naturally occurring tRNA found in a mobile genetic element, such as a viral tRNA. The modified tRNA may comprise identity elements that are recognised by an aminoacyl-tRNA synthetase endogenous to the cell. The modified tRNA may retain the identity elements of the parent tRNA.

[0072] The inventors demonstrate herein that episomes encoding components of the translation machinery that are required for the translation of the gene-required-for-viability according to the reassigned genetic code can be essential to the cell. Hence, these episomes are stably maintained by the cells of the first aspect. As such, in an embodiment, the first modified tRNA may be encoded by an episome within the cell, such as a plasmid. The episome may further comprise other genes for which stable maintenance is desired.

[0073] In a particular example, the cell is E. coli and comprises a genome that has been recoded with respect to a first and a second type of sense codon (e.g. TCA and TCG). The first modified tRNA may be an E. coli isoacceptor tRNA for a first amino acid (e.g. alanine) that has been altered to comprise an anticodon complementary to the first type of sense codon (e.g. TCA). The second modified tRNA may be an E. coli isoacceptor tRNA for a second amino acid (e.g. histidine) that has been altered to comprise an anticodon complementary to the first type of sense codon (e.g. TCG).

[0074] In some examples, the first modified tRNA cannot decode the second type of sense codon and/or the second modified tRNA cannot decode the first type of sense codon. In further examples, the first modified tRNA cannot decode any type of codon apart from the first type of sense codon and/or the second modified tRNA cannot decode any type of codon apart from the second type of sense codon.

[0075] The first and the second amino acids may be the same amino acid, for instance they may both be alanine, histidine, leucine, or proline. In other examples, the first and second amino acids may be different. For example, one may be alanine where the other is leucine, etc. Some exemplary reassignment schemes are shown in FIG. 2C.

[0076] The cell may be described as comprising tRNA_{XXX}^{Xaa} (where XXX is the type of sense codon and Xaa is the charged amino acid). Thus, a cell making use of a particular reassignment scheme may be defined as comprising the relevant tRNA. For instance, in particular embodiments, a cell making use of a reassignment of TCG to alanine and TCA to histidine comprises tRNA_{CGA}^{Ala} and tRNA_{UGA}^{His}; and a cell making use of a reassignment of TCG to histidine and TCA to alanine comprises tRNA_{CGA}^{His} and tRNA_{UGA}^{Ala}.

[0077] The first and/or second amino acid may be a naturally occurring amino acid. The naturally occurring amino acid may be any natural proteinogenic amino acid. A “natural proteinogenic amino acid” is any one of L-alanine, L-cysteine, L-aspartic acid, L-glutamic acid, L-phenylalanine, glycine, L-histidine, L-isoleucine, L-lysine, L-leucine, L-methionine, L-asparagine, L-proline, L-glutamine, L-arginine, L-serine, L-threonine, L-valine, L-tryptophan and L-tyrosine, L-pyrrolysine, and L-selenocysteine. The naturally occurring amino acid may be a canonical amino acid. A “canonical amino acid” is any one of L-alanine, L-cysteine, L-aspartic acid, L-glutamic acid, L-phenylalanine, glycine, L-histidine, L-isoleucine, L-lysine, L-leucine, L-methionine, L-asparagine, L-proline, L-glutamine, L-arginine, L-serine, L-threonine, L-valine, L-tryptophan, and L-tyrosine.

[0078] The cell of the first aspect may be any species or type as disclosed herein. For instance, the cell may be a bacterial cell with a genome recoded with regards to codons TCA and TCG, which lacks tRNA^{Ser}_{UGA} and tRNA^{Ser}_{CGA}, and wherein TCA and TCG have been reassigned. The genome of the cells may have been recoded in any manner as discussed herein. The reassignment scheme for the cells of the first aspect may be any disclosed herein, for instance one of the schemes illustrated in FIG. 2C.

[0079] The cell may be Syn61, a strain that is derived from Syn61, or recoded in the same manner as Syn61. The cell may be Syn61Δ3, a strain that is derived from Syn61Δ3, or may be modified in the same manner as Syn61Δ3.

[0080] The features of the first aspect, which relate to “code locking”, may be applied to the recoding schemes of the second aspect or the third aspect. Thus, any features of the first, second, and third aspects may be combined and are not mutually exclusive. The features of the second and third aspect, for instance the tRNAs and the coding schemes, may be applied to the first aspect.

[0081] The cells of the first aspect may have increased resistance to mobile genetic elements. The cells of the first aspect may have improved maintenance of resistance to mobile genetic elements; for instance the resistance may be maintained in a cell culture for a longer period when compared to a control culture not comprising code-locked cells.

### Orthogonal Coding Schemes

[0082] There are an increasing number of applications for genetically modified organisms, and a need to limit the transfer of genetic information from these organisms to natural organisms. The inventors provide herein orthogonal coding schemes, which prevent the transfer of genetic information to natural organisms or to organisms making use of alternative orthogonal coding schemes. For instance, mobile genetic elements that make use of one of said orthogonal coding schemes cannot transfer to or be expressed by a natural organism.

[0083] Others have attempted to generate synthetic genetic information to prevent horizontal gene transfer (Nyerges et al. “Swapped genetic code blocks viral infections and gene transfer”). However, the inventors provide herein a screening method that allows the development of tRNAs that are active and specific (see FIG. 8 (FIG. S3). As the skilled person would appreciate, the screen, as disclosed in the examples, can be adapted for use with codons other than TCA and TCG and enables the development of active and specific tRNAs that do not decode off-target codons.

[0084] Thus, in a second aspect, there is provided a cell that: comprises a genome wherein a first type of sense codon and a second type of sense codon have been recoded such that a first endogenous tRNA and a second endogenous tRNA are dispensable; does not express the first endogenous tRNA and the second endogenous tRNA; expresses a first anticodon-swapped tRNA derived from a naturally occurring first parent tRNA, wherein the first anticodon-swapped tRNA is charged with a first amino acid and the first parent tRNA is an isoacceptor for the first amino acid, and wherein the first amino acid is not a naturally cognate amino acid for the first type of sense codon; and expresses a second anticodon-swapped tRNA derived from a naturally occurring second parent tRNA, wherein the second anticodon-swapped tRNA is charged with a second amino acid and the second parent tRNA is an isoacceptor for the second amino acid, and wherein the second amino acid is not a naturally cognate amino acid for the second type of sense codon; wherein the first and/or second modified tRNA cannot decode any type of codon apart from the first type of sense codon and/or the second type of sense codon.

[0085] In a particular embodiment, a tRNA does not decode a particular codon when the rate of misincorporation is undetectable in a screening method disclosed herein or is too low to affect the fitness of the cell. Thus, the tRNAs of the second aspect may not have a detectable rate of misincorporation of non-target codons, or may not have a rate of misincorporation that would be relevant considering the size of the host genome in question. In an embodiment, the tRNAs of the second aspect are as active and specific as the tRNAs exemplified in Example 3, namely any one of tRNA_{CGA}^{Ala}, tRNA_{UGA}^{Ala}, tRNA_{CGA}^{His}, tRNA_{UGA}^{His}, tRNA_{CGA}^{Leu}, tRNA_{UGA}^{Leu}, and tRNA_{CGA}^{Leu}, tRNA_{UGA}^{Leu}.

[0086] An anticodon-swapped tRNA is one where the residues of the anticodon have been substituted such that the tRNA has a different codon specificity. The anticodon-swapped tRNAs may also be modified in other ways, for instance additional sequence may be added.

[0087] The present inventors have surprisingly found that sense codons which canonically encode the same amino acid, and which would canonically be decoded by the same tRNA or overlapping tRNAs due to wobble base pairing, may be used to code for multiple alternative amino acids. It would have been expected that such sense codons would only allow for a single reassignment. The inventors provide herein a screening method that enables the development of tRNAs with the required activity and specificity. This finding is advantageous because in an exemplary organism with, for example, two reassigned serine codons, the inventors are able to generate many different orthogonal codes. As an illustration, the inventors have generated 16 refactored codes from just two reassigned sense codons and four amino acids.

[0088] Thus, in some examples, the first and second type of sense codon would canonically be decoded by the same tRNA or overlapping tRNAs due to wobble base pairing. The first anticodon-swapped tRNA may be unable to decode any codon type apart from the first type of sense codon and the second anticodon-swapped tRNA may be unable to decode any codon type apart from the second type of sense codon. This allows the first and second types of sense codon to be used to code for two different amino acids, without misincorporation.

[0089] The first type of sense codon and the second type of sense codon may be of the formula XXN. This means that the first and the second bases are the same, whereas the third base is different. In examples, the first anticodon-swapped tRNA cannot decode the second type of sense codon and the second anticodon-swapped tRNA cannot decode the first type of sense codon.

[0090] In some examples, the first anticodon-swapped tRNA cannot decode any codon type apart from the first type of sense codon and/or the second anticodon-swapped tRNA cannot decode any codon type apart from the second type of sense codon.

[0091] In particular embodiments, the first anticodon-swapped tRNA does not decode TCC or TCT codons and the second anticodon-swapped tRNA does not decode TCC or TCT codons. As an example, this may be advantageous when the first or second type of recoded sense codon is TCA or TCG because mis-incorporation at TCC or TCT codons may reduce the fitness of the cell. For instance, some E. coli genomes comprise 9,999 TCC codons and 9,566 TCT codons, and so misincorporation can affect fitness. In a particular embodiment, a tRNA does not decode a particular codon when the rate of misincorporation is undetectable in a screening method disclosed herein or too low to affect the fitness of the cell. Thus, the tRNAs may not have a detectable rate of misincorporation at TCC or TCT, or may not have a rate of misincorporation that would be relevant considering the size of the host genome in question. In an embodiment, the tRNAs of have a rate of misincorporation at TCC or TCT that is no higher than any one of tRNA_{CGA}^{Ala}, tRNA_{UGA}^{Ala}, tRNA_{CGA}^{His}, tRNA_{UGA}^{His}, tRNA_{CGA}^{Leu}, tRNA_{UGA}^{Leu}, and tRNA_{CGA}^{Leu}, tRNA_{UGA}^{Leu} as exemplified in Example 3.

[0092] The anticodon-swapped tRNAs of the second aspect are charged with the natural amino acid with which they are naturally associated. Thus, the anticodon-swapped tRNAs are charged with the same amino acid as the parent tRNA from which they are derived. The anticodon-swapped tRNA may comprise identity elements that are recognised by an aminoacyl-tRNA synthetase endogenous to the cell.

[0093] The anticodon-swapped tRNA may be derived from a tRNA that is endogenous to the cell in question. The anticodon-swapped tRNA may be derived from an isoacceptor tRNA for a particular amino acid within the cell. For instance, if the cell is E. coli the anticodon-swapped tRNA may be derived from an E. coli tRNA that is an isoacceptor for the first or second amino acid. The anticodon-swapped tRNA may be derived from a naturally occurring tRNA found in a mobile genetic element, such as a viral tRNA. The anticodon-swapped tRNA may retain the identity elements of the parent tRNA.

[0094] In examples, the first and second type of sense codon may both canonically encode serine, may both canonically encode alanine, or may both canonically encode leucine.

[0095] In a particular embodiment, the first type of sense codon is TCA and the second type of sense codon is TCG.

[0096] The first and/or second type of sense codon may be reassigned to any natural proteinogenic amino acid or canonical amino acid. In illustrative embodiments, the first type of sense codon, for instance a canonical serine codon, may be reassigned to one of alanine, histidine, leucine, and proline, and the second type of sense codon, for instance a canonical serine codon, may be reassigned to one of alanine, histidine, leucine, and proline.

[0097] In particular examples, TCA may be reassigned to any non-serine natural proteinogenic amino acid or canonical amino acid and/or TCG may be reassigned to any non-serine natural proteinogenic amino acid or canonical amino acid. In further illustrative embodiments, TCA may be reassigned to one of alanine, histidine, leucine, and proline, and TCG may be reassigned to one of alanine, histidine, leucine, and proline. In some examples, the reassignment scheme is as disclosed in FIG. 2C.

[0098] In other examples, the first amino acid and the second amino acid are different types of amino acid. The following are exemplary reassignment schemes:
[0099] TCG to alanine and TCA to histidine
[0100] TCG to alanine and TCA to leucine
[0101] TCG to alanine and TCA to proline
[0102] TCG to histidine and TCA to alanine
[0103] TCG to histidine and TCA to leucine
[0104] TCG to histidine and TCA to proline
[0105] TCG to leucine and TCA to alanine
[0106] TCG to leucine and TCA to histidine
[0107] TCG to leucine and TCA to proline
[0108] TCG to proline and TCA to alanine
[0109] TCG to proline and TCA to histidine
[0110] TCG to proline and TCA to leucine.

[0111] The first or second anticodon-swapped tRNA may derived from a parent tRNA encoded by ArgQ, ArgU, GltU, HisR, ProK, ProL, ProM, TrpT, ThrU, ThrT, TyrU, TyrV, AlaT, or LeuQ. Hence, the first or second anticodon-swapped tRNA may be encoded by any one said of genes, wherein the anticodon has been modified such that the tRNA recognises a type of sense codon that is not canonically associated with the amino acid with which the parent tRNA is charged. In a particular example, the first or second anticodon-swapped tRNA may be derived from a parent tRNA encoded by HisR, ProM, AlaT, or LeuQ. The genes encoding the tRNA may be derived from E. coli.

[0112] In some examples, the first and the second anticodon-swapped tRNAs are derived from a parent tRNA encoded by the group consisting of: ArgQ, ArgU, GltU, HisR, ProK, ProL, ProM, TrpT, ThrU, ThrT, TyrU, TyrV, AlaT, and LeuQ. In some examples, the first and the second anticodon-swapped tRNAs are derived from a parent tRNA encoded by the group consisting of: HisR, ProM, AlaT, and LeuQ.

[0113] In some examples the ArgQ, ArgU, GltU, HisR, ProK, ProL, ProM, TrpT, ThrU, ThrT, TyrU, TyrV, AlaT, or LeuQ gene is unmodified except the anticodon. In other examples, the gene may include additional sequence or be truncated. In particular examples, the encoded tRNA may comprise the identity elements of the parent tRNA. In other examples, the genes may comprise one or more modifications, wherein the encoded tRNA remains functional. The genes may comprise 10 or fewer, 9 or fewer, 8 or fewer, 7 or fewer, 6 or fewer, 5 or fewer, 4 or fewer, 3 or fewer, 2 or fewer, 1, or no substitutions, additions, or replacements.

[0114] In some examples, the anticodon is swapped to UGA or CGA. In some examples, the first anticodon-swapped tRNA is swapped to UGA and the second anticodon-swapped tRNA is swapped to CGA.

[0115] In particular examples, the ArgQ-derived tRNA is according to SEQ ID NO: 43 or 44, the GltU-derived tRNA is according to SEQ ID NO: 19 or 20, the HisR-derived tRNA is according to SEQ ID NO: 49 or 50, the ProK-derived tRNA is according to SEQ ID NO: 55 or 56, the ProL-derived tRNA is according to SEQ ID NO: 57 or 58, the ProM-derived tRNA is according to SEQ ID NO: 59 or 60, the TrpT-derived tRNA is according to SEQ ID NO: 61 or 62, the ThrU-derived tRNA is according to SEQ ID NO: 25 or 26, the ThrT-derived tRNA is according to SEQ ID NO: 23 or 24, the TyrV-derived tRNA is according to SEQ ID NO: 63 or 64, the AlaT-derived tRNA is according to SEQ ID NO: 65 or 66, and the LeuQ-derived tRNA is according to SEQ ID NO: 67 or 68. Any of these sequences may comprise one or more modifications, wherein the encoded tRNA remains functional. Any of these sequences may comprise 10 or fewer, 9 or fewer, 8 or fewer, 7 or fewer, 6 or fewer, 5 or fewer, 4 or fewer, 3 or fewer, 2 or fewer, 1, or no substitutions, additions, or replacements. The modifications may be in a region not encoding an identity element. Any of these sequences may be modified to encode a different anticodon. The alternative anticodon may not be the naturally associated anticodon.

[0116] The cell of the second aspect may be any species or type as disclosed herein. For instance, the cell may be a bacterial cell with a genome recoded with regards to codons TCA and TCG, which lacks tRNA^{Ser}_{UGA} and tRNA^{Ser}_{CGA}. The genome of the cells may have been recoded in any manner as discussed herein. The cell may be Syn61, a strain that is derived from Syn61, or recoded in the same manner as Syn61. The cell may be Syn61Δ3, a strain that is derived from Syn61Δ3, or may be modified in the same manner as Syn61Δ3.

[0117] Reassignment schemes may vary in their efficiency. For instance, FIG. 4C compares two different genetic coding schemes and notes differences in the colony counts. The reassignment scheme can affect the fitness of the cell. The contribution of verified reassignment schemes is therefore a valuable contribution.

[0118] Thus, in a third aspect, there is provided a cell that: comprises a genome wherein a first type of sense codon and a second type of sense codon have been recoded such that a first endogenous tRNA and a second endogenous tRNA are dispensable; does not express the first endogenous tRNA and the second endogenous tRNA; expresses a first modified tRNA capable of decoding the first type of sense codon, wherein the first modified tRNA is charged with a first amino acid that is not a naturally cognate amino acid for the first type of sense codon; and expresses a second modified tRNA capable of decoding the second type of sense codon, wherein the second modified tRNA is charged with a second amino acid that is not a naturally cognate amino acid for the second type of sense codon; wherein: i) the first amino acid is alanine and the second amino acid is alanine; ii) the first amino acid is alanine and the second amino acid is histidine; iii) the first amino acid is alanine and the second amino acid is leucine; iv) the first amino acid is alanine and the second amino acid is proline; v) the first amino acid is histidine and the second amino acid is alanine; vi) the first amino acid is histidine and the second amino acid is histidine; vii) the first amino acid is histidine and the second amino acid is leucine; viii) the first amino acid is histidine and the second amino acid is proline; ix) the first amino acid is leucine and the second amino acid is alanine; x) the first amino acid is leucine and the second amino acid is histidine; xi) the first amino acid is leucine and the second amino acid is proline; xii) the first amino acid is proline and the second amino acid is alanine; xiii) the first amino acid is proline and the second amino acid is histidine; xiv) the first amino acid is proline and the second amino acid is leucine; or xv) the first amino acid is proline and the second amino acid is proline.

[0119] The modified tRNA may be as discussed for the first or second aspect. In particular, the first modified tRNA may be unable to decode the second type of sense codon and/or the second modified tRNA may be unable to decode the first type of sense codon. In some examples, the first modified tRNA cannot decode any type of codon apart from the first type of sense codon and/or the second modified tRNA cannot decode any type of codon apart from the second type of sense codon. This high specificity is enabled for the first time by the screening methods disclosed herein.

[0120] The modified tRNA is one that is derived from a tRNA, which may be a naturally occurring tRNA, that has been altered such that it is capable of decoding a codon to an amino acid with which the codon is not associated in the canonical genetic code. For instance, the residues of the anticodon of the tRNA may be substituted such that the tRNA has a different codon specify, such tRNAs may be referred to as anticodon-swapped tRNAs. The modified tRNAs may also be modified in other ways, for instance additional sequence may be added. The modified tRNAs may be charged with the natural amino acid with which the parent tRNAs are naturally associated. The modified tRNA may be derived from a naturally occurring tRNA (which may be referred to as a parent tRNA). For instance, the modified tRNA may be derived from a tRNA that is endogenous to the cell in question. The modified tRNA may be derived from an isoacceptor tRNA for a particular amino acid within the cell. For instance, if the cell is E. coli the modified tRNA may be derived from an E. coli tRNA that is an isoacceptor for the first or second amino acid. The modified tRNA may be derived from a naturally occurring tRNA found in a mobile genetic element, such as a viral tRNA. The modified tRNA may comprise identity elements that are recognised by an aminoacyl-tRNA synthetase endogenous to the cell. The modified tRNA may retain the identity elements of the parent tRNA.

[0121] The recoding scheme may be any as discussed herein. In a particular embodiment, the first type of sense codon is TCA and the second type of sense codon is TCG.

[0122] The cell of the third aspect may be any species or type as disclosed herein. For instance, the cell may be a bacterial cell with a genome recoded with regards to codons TCA and TCG, which lacks tRNA^{Ser}_{UGA} and tRNA^{Ser}_{CGA}. The cell may be Syn61, a strain that is derived from Syn61, or recoded in the same manner as Syn61. The cell may be Syn61Δ3, a strain that is derived from Syn61Δ3, or may be modified in the same manner as Syn61Δ3.

### Kits Comprising Cells Making Use of Mutually Orthogonal Coding Schemes

[0123] The inventors have discovered that cells making use of a first orthogonal code may be mutually orthogonal with cells making use of a second orthogonal code (see FIG. 4C). Thus, such cells may coexist with each other, and optionally with cells making use of the canonical genetic code, and no horizontal gene transfer will be able to take place between cells not of the same coding scheme.

[0124] Thus, in a sixth aspect of the invention, there is provided a kit comprising a first cell recoded according to a first orthogonal coding scheme and a second cell recoded according to a second orthogonal coding scheme, where the first and second coding schemes are mutually orthogonal.

[0125] In an example, the kit comprises a first cell of the first, second, or third aspect and a second cell of the first, second, or third aspect, wherein the first and second cells make use of coding schemes that are mutually orthogonal.

[0126] In some examples, the first and/or second orthogonal genetic coding scheme is any disclosed herein, such as any orthogonal genetic code of FIG. 2C.

[0127] In an example, the kit may comprise a first cell, which may be a bacterial cell such as E. coli, that makes use of a reassignment scheme illustrated in FIG. 2C. The second cell of the kit, which may be a bacterial cell such as E. coli, may make use of a different reassignment scheme illustrated in FIG. 2C. In some examples, the cells are based upon or derived from Syn61.

[0128] In a particular example, the first cell comprises tRNA_{CGA}^{Ala} and tRNA_{UGA}^{His} or comprises tRNA_{CGA}^{His} and tRNA_{UGA}^{Ala}.

[0129] The kit may further comprise a cell that makes use of the canonical genetic code.

[0130] The kit may further comprise a first mobile genetic element that has been recoded according to the first orthogonal coding scheme. The kit may further comprise a second mobile genetic element that has been recoded according to the second orthogonal coding scheme. The first and/or the second mobile genetic element may be a mobile genetic element as disclosed herein.

[0131] In an example, the kit may comprise a mobile genetic element where at least one, a plurality, or every instance of a codon canonically encoding alanine (i.e. the GCN codons) in at least one gene required for horizontal transfer of genetic information has been replaced with TCG or TCA, and the kit may comprise a cell expressing a modified tRNA capable of decoding TCG or TCA to alanine. The tRNA may be as disclosed for the first, second, or third aspect.

[0132] In an example, the kit may comprise a mobile genetic element where at least one, a plurality, or every instance of a codon canonically encoding histidine (i.e. the CAT/C codons) in at least one gene required for horizontal transfer of genetic information has been replaced with TCG or TCA, and may comprise a cell expressing a modified tRNA capable of decoding TCG or TCA to histidine. The tRNA may be as disclosed for the first, second, or third aspect.

[0133] In a particular example, the kit may comprise a mobile genetic element where at least one, a plurality, or every instance of the GCN codons in at least one gene required for horizontal transfer of genetic information have been replaced with TCG codons; and at least one, a plurality, or every instance of the CAT/C codons in at least one gene required for horizontal transfer of genetic information have been replaced with TCA codons.

[0134] The kit may further comprise a third, fourth, fifth, or further cell, wherein each of the third, fourth, fifth, or further cell makes use of a coding scheme that is mutually orthogonal with every other cell.

### Mobile Genetic Elements

[0135] The inventors demonstrate that mobile genetic elements that make use of an orthogonal genetic code are unable to transfer to cells making use of the canonical genetic code or to cells making use of a mutually orthogonal genetic code. It is shown that horizontal gene transfer is prevented in mobile genetic elements, for instance F plasmids that transfer via conjugation. This is an improvement over orthogonal genetic elements that would need to be electroporated, as such elements are not truly mobile.

[0136] Thus, in a seventh aspect, there is provided a mobile genetic element recoded according to an orthogonal coding scheme.

[0137] The orthogonal coding scheme may be any as discussed herein, including any in FIG. 2C.

[0138] In an embodiment, there is provided a mobile genetic element where at least one, a plurality, or every instance of a particular type of sense codon in at least one gene required for horizontal transfer of genetic information is replaced with a sense codon that canonically encodes a different amino acid.

[0139] In an embodiment, there is provided a mobile genetic element where at least one, a plurality, or every instance of a codon canonically encoding alanine, leucine, histidine, proline, or any combination thereof, in at least one gene required for horizontal transfer of genetic information is replaced with a sense codon that does not encode the respective amino acid. In some examples, the new sense codon may canonically encode serine, such as TCA or TCG.

[0140] In an embodiment, there is provided a mobile genetic element where at least one, a plurality, or every instance of a codon canonically encoding alanine, leucine, histidine, proline, or any combination thereof, in at least one gene required for horizontal transfer of genetic information is replaced with TCG or TCA.

[0141] For instance, at least one, a plurality, or every occurrence of the codons canonically encoding alanine (the GCN codons) in at least one gene required for horizontal transfer of genetic information may be replaced in the mobile genetic element with a codon that has been reassigned to alanine. In an embodiment, there is provided a mobile genetic element where at least one, a plurality, or every instance of a codon canonically encoding alanine (i.e. the GCN codons) in at least one gene required for horizontal transfer of genetic information has been replaced with TCG or TCA.

[0142] Alternatively or in addition, at least one, a plurality, or every instance of the codons canonically encoding histidine (the CAT/C codons) in at least one gene required for horizontal transfer of genetic information may be replaced with a codon that has been reassigned to histidine. In an embodiment, there is provided a mobile genetic element where at least one, a plurality, or every instance of a codon canonically encoding histidine (i.e. the CAT/C codons) in at least one gene required for horizontal transfer of genetic information has been replaced with TCG or TCA.

[0143] In an embodiment, there is provided a mobile genetic element where at least one, a plurality, or every instance of a codon canonically encoding alanine (the GCN codons) in at least one gene required for horizontal transfer of genetic information has been replaced with TCG and at least one, a plurality, or every instance of a codon canonically encoding histidine (the CAT/C codons) in at least one gene required for horizontal transfer of genetic information has been replaced with TCA.

[0144] The mobile genetic element includes at least one gene required for horizontal transfer of genetic information that has been recoded according to a reassignment scheme. The mobile genetic element may comprise two, three, four, or more such genes. Genes within the mobile genetic element that are not required for the horizontal transfer of genetic information may be recoded to have a compressed coding scheme, e.g. one or more type of sense codon may not be present in said gene. The genes within the mobile genetic element that are not required for the horizontal transfer of genetic information may also comprise one or more codons that have been reassigned (e.g. replaced with another codon according to a reassignment scheme). Thus, in some embodiments, all of the genes in the mobile genetic element have been recoded such that one or more type of sense codon is not present and one or more of the genes, and the mobile gene element comprises at least one gene required for horizontal transfer of genetic information that has been recoded according to a reassignment scheme.

[0145] In some examples, the mobile genetic element may be a plasmid or a virus. The mobile genetic element may be a phage. The mobile genetic element may be the F plasmid.

[0146] In one aspect of the invention, there is provided a kit comprising a first mobile genetic element as disclosed herein and a first cell of the first, second, or third aspect as disclosed herein, wherein the first mobile genetic element and the first cell make use of the same genetic coding scheme.

[0147] In an example, the kit may comprise a mobile genetic element where at least one, a plurality, or every instance of a codon canonically encoding alanine (the GCN codons) in at least one gene required for horizontal transfer of genetic information has been replaced with TCG or TCA, and may comprise a cell expressing a modified tRNA capable of decoding TCG or TCA to alanine. The tRNA may be as disclosed for the first, second, or third aspect. Alternatively, or in addition, the kit may comprise a mobile genetic element where at least one, a plurality, or every instance of a codon canonically encoding histidine (the CAT/C codons) in at least one gene required for horizontal transfer of genetic information has been replaced with TCG or TCA, and may comprise a cell expressing at modified tRNA capable of decoding TCG or TCA to histidine In other examples the kit may comprise a mobile genetic element and a cell that make use of any orthogonal genetic code disclosed herein. For instance, any orthogonal genetic code of FIG. 2C.

[0148] The kit may comprise a second mobile genetic element as disclosed herein and a second cell of the of the first, second, or third aspect, wherein the second mobile genetic element and the second cell make use of the same genetic coding scheme, and wherein the first mobile genetic element and the second mobile genetic element make use of different genetic coding schemes. In some examples, the genetic coding scheme of the second mobile genetic element and the second cell is any disclosed herein, such as any orthogonal genetic code of FIG. 2C.

[0149] The kit may further comprise third, fourth, fifth, or further mobile genetic elements and cells, wherein each pair of mobile genetic element and cell is compatible and orthogonal with every other pair.

### Methods of Increasing the Resistance of a Cell to Mobile Genetic Elements or Horizontal Gene Transfer

[0150] In a fifth aspect of the invention, there is provided a method of increasing the resistance of a cell to mobile genetic elements or horizontal gene transfer, wherein the cell has been modified to reassign at least one type of sense codon to an amino acid not associated with the sense codon in the canonical genetic code, said method comprising: modifying a gene required for viability to include at least one occurrence of the reassigned sense codon, wherein the cell is viable if the reassigned sense codon in said gene is decoded as the reassigned amino acid, and the cell is not viable if the reassigned sense codon in said gene is decoded according to the canonical genetic code, or wherein the reassigned sense codon in said gene at least partially contributes to a loss of viability if decoded according to the canonical genetic code.

[0151] The increased resistance may be resistance that is maintained for a longer period of time. For instance, resistance that is not lost during prolonged cell culture (see Example 7). Thus, the cells of the fifth aspect may exhibit resistance to horizontal gene transfer or mobile genetic elements that is maintained over a longer period of time compared to cells that are not code locked.

[0152] The genome of the cell may have been recoded to remove instances of at least one type of sense codon. The recoding may be any as disclosed herein, for instance to recode TCA or TCG. The cell may not express at least one endogenous tRNA, such as tRNA^{Ser}_{UGA} or tRNA^{Ser}_{CGA}. The assignment may be due to the insertion of a modified tRNA or modified tRNAs. The modified tRNA may be any as disclosed herein, for instance anticodon-swapped isoacceptor tRNAs for any of alanine, leucine, histidine, or proline.

[0153] The gene required for viability may be any, including any disclosed herein. For instance, the gene may be an essential gene or a positive selectable marker.

[0154] The resultant cells may be cells of the first, second, or third aspects of the invention, and so the method may be modified accordingly.

### Resistance to Horizontal Gene Transfer

[0155] The cells of the disclosure, including those of the first, second, and third aspect, may be resistant to horizontal gene transfer. For instance, the cells may be resistant to transfer of genetic information from mobile genetic elements, including plasmids (such as the F plasmid), viruses (including phages), and the like.

[0156] In particular, the cells of the present disclosure may be resistant to the transfer of genetic information from mobile genetic elements comprising relevant tRNAs. A relevant tRNA may be one that could decode one or more reassigned codon according to the canonical genetic code.

[0157] In some embodiments, the cells may reduce or may completely ablate transfer of a F plasmid comprising a relevant tRNA. This property can be testing using the methods of present FIG. 5C.

[0158] The cells may be bacteria and may be resistant to the bacteriophages disclosed in Nyerges et al. “Swapped genetic code blocks viral infections and gene transfer”. The cells may be E. coli and resistant to said bacteriophages.

[0159] The cells are also resistant to horizontal gene transfer from said cells into other types of cells. For instance, the cells of the first, second, or third aspect, or as created by methods of the fifth aspect, may be unable to transfer synthetic genes to wild-type bacteria or to bacteria. The cells of the present disclosure may be unable to transfer synthetic genes to wild-type bacteria of the same species. The synthetic genes may be according to any reassigned coding scheme as disclosed herein.

[0160] In addition, the cells of the present disclosure are also resistant to horizontal gene transfer from said cells to other cells not using the same reassigned coding scheme. Thus, the cells of the present disclosure are unable to transfer synthetic genes to bacteria not able to decode the synthetic gene according to the particular reassigned coding scheme. The other bacteria may also make use of a reassigned coding scheme but, if said scheme is orthogonal to the cells of the present disclosure, then horizontal gene transfer will be prevented.

Methods of Altering Susceptibility of a Gene to Mutations that Alter the Encoded Amino Acid Sequence

[0161] The cells, codes, and techniques disclosed herein enable methods for altering the susceptibility of a gene to mutations that alter the encoded amino acid sequence. Thus, the refactored codes disclosed herein may be used for accelerating or deaccelerating the rates of protein evolution.

[0162] The canonical genetic code is, to a degree, conservative in that a point mutation may not alter the encoded amino acid. Additionally, a point mutation may alter the encoded amino acid to be another amino acid with similar properties (e.g. a conservative substitution) or dissimilar properties (e.g. a non-conservative substitution). The number of differences between types of codons may be varied and this may affect the chance that a point mutation will lead to: no change in encoded amino acid, a conservative change, or a non-conservative change. The inventors provide codes, and techniques for implementing such codes, that alter the mutational landscape (see, for instance, FIG. 10 (FIG. S5) and FIG. 11 (FIG. S6)).

[0163] Therefore, in one aspect, there is provided a method of altering susceptibility of a gene to mutations that alter the encoded amino acid sequence, the method comprising:
[0164] i) identifying a target gene; and
[0165] ii) incubating a cell comprising the target gene, wherein the cell comprises a tRNA capable of decoding at least one sense codon to a reassigned amino acid.

[0166] The target gene can be one or more target gene (or genes). The target gene can be a synthetic or natural gene. Suitably, a synthetic gene can alter the codon usage to favour evolutionary trajectories. In some aspects, the target gene may be according to a compressed genetic code.

[0167] The cell may be any as disclosed herein, for instance any of the first, second, or third aspect. The cell may be a bacterial cell such as E. coli, that has been recoded with respect to a first and a second type of sense codon. The cell may be Syn61, derived from Syn61, or recoded in the same manner as Syn61. The cell may be Syn61Δ3, derived from Syn61Δ3, or recoded in the same manner as Syn61Δ3.

[0168] In examples, the reassignment scheme may be any as illustrated in FIG. 2C. These schemes may be used to alter the mutational landscape as depicted in FIG. 11 (FIG. S6).

[0169] The cell may be incubated under conditions likely to or intended to cause mutations. The method may be for the purpose of evolving or improving a protein. The method may be for the purpose of rendering a target gene more resistant to mutation, for instance to protect the cell from harmful mutations.

### Recoding of Sense Codons

[0170] This section further describes exemplary embodiments of the recoding and is applicable to all aspects disclosed herein.

[0171] An endogenous tRNA is considered to be not expressed if the endogenous tRNA is not present in a form that would allow it to decode its cognate codon(s). Thus, an endogenous tRNA may be removed using any manner that would prevent the production of a functional form of the endogenous tRNA within the cell. For instance, the endogenous gene may be deleted or a portion of the gene may be deleted to prevent expression. Regulatory sequences may be deleted or altered to prevent expression. Alternatively, nonsense, frameshift, or missense mutations may prevent expression of the tRNA in a functional form.

[0172] “Recoding” as used herein, is the replacement of an occurrence of a type of codon with a different codon, such that the occurrence of the codon is removed from the genome. The recoded sense codon may be replaced with a synonymous codon to result in different codon usage without changing the encoded polypeptide. Alternatively, the sense codon may be replaced with a non-synonymous codon, for instance if the alteration in the sequence of the encoded polypeptide does not affect viability. The deleted endogenous tRNAs are those that are dispensable in light of the recoding. “Dispensable” as used herein, means not required for viability of the cell.

[0173] Viable cells are those that are capable of being metabolically active. In a particular embodiment, a viable cell may be capable of growth when cultured in an appropriate media and under appropriate conditions for the particular species or strain. Such cells may be referred to as capable of being cultured. As an example, if the cell is a bacterial cell such as E. coli, the assessment of viability may be performed by culturing said bacteria in a medium comprising LB medium, or on an agar comprising LB agar, at 37° C. The medium or agar may be supplemented with 2% glucose. Growth of the bacteria may be monitored using standard approaches, such as measurement of the OD₆₀₀. Alternative approaches, or approaches adapted to particular cells, bacteria strains, bacterial species, or in light of the inclusion of marker genes, are known to the skilled person.

[0174] A endogenous tRNA that decodes one or more sense codons that have been replaced (or deleted) may be deleted and the cell will remain viable if the tRNA decodes only the one or more sense codons that have been replaced (or deleted); or alternatively if the tRNA decodes one or more sense codons that have been replaced (or deleted) and one or more sense codons that have not been replaced (or deleted), if the tRNA is dispensable for the one or more sense codons that have not been replaced (or deleted) (i.e. the one or remaining sense codons which the tRNA decodes are decoded by one or more alternative tRNAs). For example, if the genome of a prokaryotic cell lacks TCA sense codons, serT, encoding tRNA_{Ser}^{UGA}, may be deleted and/or if the genome lacks TCG sense codons, serU, encoding tRNA_{Ser}^{CGA}, may be deleted. Thus, in an embodiment, the cell expresses neither tRNA_{Ser}^{UGA} nor tRNA_{Ser}^{CGA}.

[0175] The number of occurrences of the first and/or second type of sense codon that are recoded is adequate to enable the removal of the cognate tRNAs corresponding to said sense codons while maintaining viability of the cell. For example, this may be achieved by removing all of the natural occurrences of the first and second type of sense codon from the essential genes. In particular, a gene is considered essential if a “blank” codon (i.e. a codon for which the cell contains no corresponding tRNA or release factor) within the gene results in a loss of cell viability. Therefore, in an embodiment, all of the genes of the cell for which a blank codon could not be tolerated without a loss of viability are recoded, but genes that are able to tolerate blank codons may not be recoded. Thus, the skilled person can assess whether all of the essential genes have been recoded by assessing whether a cognate tRNA is dispensable. Notably, some embodiments require at least one essential gene to comprise the first and/or second type of sense codon; however, in such embodiments said codons are reassigned and not in a naturally occurring position.

[0176] The cells of the present disclosure, including the cells of the first, second, and third aspects, may be recoded with respect to a first, second, third, fourth, fifth, or further type of sense codon. The recoding of first and second types of sense codons is exemplified herein, and the skilled person would understand that the principle may be extended to recode, and hence reduce the occurrences of, further types of sense codon within the cell's genome. For example, further types of sense codon may be replaced by synonymous codons to remove particular occurrences without altering the encoded sequence, and adequate numbers of a particular type of sense codon may be removed such that at least one further endogenous tRNA is dispensable and need not be expressed by the cell.

[0177] In particular embodiments, the genome comprises 100 or more, 200 or more, or 300 or more essential genes with no natural occurrences of the first and/or second type of sense codon. For instance, all or substantially all of the essential genes in the genome may comprise no natural occurrences of the first and/or second type of sense codon.

[0178] In some embodiments, the essential genes may be selected from one or more of the list consisting of: ribF, ispA, ispH, dapB, folA, imp, yabQ, ftsL, ftsI, murE, murF, mraY, murD, ftsW, murG, murC, ftsQ, ftsA, ftsZ, lpxC, secM, secA, can, folK, hemL, yadR, dapD, map, rpsB, tsf, pyrH, frr, dxr, ispU, cdsA, yaeL, yaeT, lpxD, fabZ, lpxA, lpxB, dnaE, accA, tilS, proS, yafF, hemB, secD, secF, ribD, ribE, thiL, dxs, ispA, dnaX, adk, hemH, lpxH, cysS, folD, entD, mrdB, mrdA, nadD, holA, rlpB, leuS, lnt, ginS, fldA, cydA, infA, cydC, ftsK, lolA, serS, rpsA, msbA, lpxK, kdsB, mukF, mukE, mukB, asnS, fabA, mviN, rne, fabD, fabG, acpP, tmk, holB, lolC, loD, lolE, purB, minE, minD, pth, prsA, ispE, lolB, hemA, prfA, prmC, kdsA, topA, ribA, fabI, tyrS, ribC, ydiL, pheT, pheS, rplT, infC, thrS, nadE, gapA, yeaZ, aspS, argS, pgsA, yejM, metG, folE, yejM, gyrA, nrdA, nrdB, folC, accD, fabB, gltX, ligA, zipA, dapE, dapA, der, hisS, ispG, suhB, tadA, acpS, era, rnc, lepB, rpoE, pssA, yfiO, rplS, trmD, rpsP, ffh, grpE, csrA, ispF, ispD, ftsB, eno, pyrG, chpR, lgt, fbaA, pgk, yqgD, metK, yqgF, plsC, ygiT, parE, ribB, cca, ygjD, tdcF, yraL, yhbV, injB, nusA, ftsH, obgE, rpmA, rplU, ispB, murA, yrbB, yrbK, yhbN, rpsI, rplM, degS, mreD, mreC, mreB, accB, accC, yrdC, def, fmt, rplQ, rpoA, rpsD, rpsK, rpsM, secY, rplO, rpmD, rpsE, rplR, rplF, rpsH, rpsN, rplE, rplX, rplN, rpsQ, rpmC, rplP, rpsC, rplV, rpsS, rplB, rplW, rplD, rplC, rpsJ, fusA, rpsG, rpsL, trpS, yrfF, asd, rpoH, ftsX, ftsE, ftsY, yhhQ, bcsB, glyQ, gpsA, rfaK, kdtA, coaD, rpmB, dfp, dut, gmk, spoT, gyrB, dnaN, dnaA, rpmH, rnpA, yidC, tnaB, glmS, glmU, wzyE, hemD, hemC, yigP, ubiB, ubiD, hemG, yihA, ftsN, mur, murB, birA, secE, nusG, rplJ, rplL, rpoB, rpoC, ubiA, plsB, lexA, dnaB, ssb, alsK, groS, psd, orn, yjeE, rpsR, chpS, ppa, valS, yjgP, yjgQ, and dnaC.

[0179] In particular, the essential genes may be selected from one or more of the list consisting of: ribF, ispA, ispH, dapB, folA, imp, yabQ, lpxC, secM, secA, can, folK, hemL, yadR, dapD, map, rpsB, tsf, pyrH, frr, dxr, ispU, cdsA, yaeL, yaeT, lpxD, fabZ, lpxA, lpxB, dnaE, accA, tilS, proS, yafF, hemB, secD, secF, ribD, ribE, thiL, dxs, ispA, dnaX, adk, hemH, lpxH, cysS, folD, entD, mrdB, mrdA, nadD, holA, rlpB, leuS, lnt, ginS, fldA, cydA, infA, cydC, ftsK, lolA, serS, rpsA, msbA, lpxK, kdsB, mukF, mukE, mukB, asnS, fabA, mviN, rne, fabD, fabG, acpP, tmk, holB, lolC, lolD, lolE, purB, minE, minD, pth, prsA, ispE, lolB, hemA, prfA, prmC, kdsA, topA, ribA, fabI, tyrS, ribC, ydiL, pheT, pheS, rplT, infC, thrS, nadE, gapA, yeaZ, aspS, argS, pgsA, yejM, metG, folE, yejM, gyrA, nrdA, nrdB, folC, accD, fabB, gltX, ligA, zipA, dapE, dapA, der, hisS, ispG, suhB, tadA, acpS, era, rnc, lepB, rpoE, pssA, yfiO, rplS, trmD, rpsP, ffh, grpE, csrA, ispF, ispD, ftsB, eno, pyrG, chpR, lgt, fbaA, pgk, yqgD, metK, yqgF, plsC, ygiT, parE, ribB, cca, ygjD, tdcF, yraL, yhbV, injB, nusA, ftsH, obgE, rpmA, rplU, ispB, murA, yrbB, yrbK, yhbN, rpsI, rplM, degS, mreD, mreC, mreB, accB, accC, yrdC, def, fmt, rplQ, rpoA, rpsD, rpsK, rpsM, secY, rplO, rpmD, rpsE, rplR, rplF, rpsH, rpsN, rplE, rplX, rplN, rpsQ, rpmC, rplP, rpsC, rplV, rpsS, rplB, rplW, rplD, rplC, rpsJ, fusA, rpsG, rpsL, trpS, yrfF, asd, rpoH, ftsX, ftsE, ftsY, yhhQ, bcsB, glyQ, gpsA, rfaK, kdtA, coaD, rpmB, dfp, dut, gmk, spoT, gyrB, dnaN, dnaA, rpmH, rnpA, yidC, tnaB, glmS, glmU, wzyE, hemD, hemC, yigP, ubiB, ubiD, hemG, yihA, ftsN, mur, murB, birA, secE, nusG, rplJ, rplL, rpoB, rpoC, ubiA, plsB, lexA, dnaB, ssb, alsK, groS, psd, orn, yjeE, rpsR, chpS, ppa, valS, yjgP, yjgQ, and dnaC.

[0180] In other embodiments, the cell may comprise a genome comprising 5 or fewer natural occurrences of the first and/or second type of sense codon. The genome may be derived from a parent genome and may comprise less than 10%, 5%, 2%, 1%, 0.5%, 0.1% of the occurrences of the first and/or second type of sense codon, relative to the parent genome. The genome may comprise 100 or more, 200 or more, or 1000 or more genes with no natural occurrences of the first and/or second type of sense codon. In particular, all or substantially all the genes in the genome may have no natural occurrences of the first and/or second type of sense codon. Thus, the genome of the cell may comprise 5, 4, 3, 2, 1, or no natural occurrences of a first type of sense codon and 5, 4, 3, 2, 1, or no natural occurrences of a second type of sense codon.

[0181] The genome may be derived from a parent genome and comprise 5 or fewer (e.g. 5, 4, 3, 2, 1), or no natural occurrences of native sense codons of the first and/or second type. In a particular embodiment, the genome is derived from a parent genome and comprises no natural occurrences of native sense codons of the first and the second type. In some embodiments the genome comprises 100 or more, 200 or more, 300 or more, 400 or more, 500 or more, 600 or more, 700 or more, 800 or more, 900 or more, 1000 or more, 1500 or more, or 2000 or more recoded genes. In some embodiments the genes are those for which there is evidence of translation and/or of the predicted protein product. For example, the genome may comprise 100 or more, 200 or more, 300 or more, 400 or more, 500 or more 600 or more, 700 or more, 800 or more, 900 or more, 1000 or more, 1500 or more, or 2000 or more recoded genes for which there is evidence of translation and/or of the predicted protein product.

[0182] In an embodiment, all annotated open reading frames within the genome have no natural occurrences of the sense codons of the first and the second type. The cell may be a bacterial cell, preferably E. coli, and the genome of the E. coli may contain no natural occurrences of a first and a second type of sense codon as annotated in GenBank accession number CP040347.1.

[0183] In a particular embodiment, the protein-encoding genes have no natural occurrences of the sense codons of the first and the second type. In particular embodiments, no proteins are translated from any of the remaining natural occurrences of the first and/or second type of sense codon and/or genes comprising the remaining natural occurrences of the first and/or second type of sense codons are putative or are non-coding genes. In some embodiments the translation of the genes comprising the remaining natural occurrences of the first and/or second type of sense codons is reduced and/or prevented (e.g. the genes may comprise stop codons in the 5′ sequence).

[0184] Any remaining natural occurrences of the sense codons may be necessary to ensure that the genome is viable. For example, one or more, in particular all, of the remaining natural occurrences of the first and/or second type of sense codons in the genome may be present in the regulatory elements of essential genes; and/or one or more, in particular all, of the remaining natural occurrences of the first and/or second type of sense codons may be in genes in which there is no evidence for translation or the predicted protein product (i.e. putative or non-coding genes).

[0185] As used herein, a “sense codon” is a nucleotide triplet that codes for an amino acid. Thus, sense codons may be identified in a genome by gene prediction, i.e. by identifying regions of the genome that code for proteins (i.e. genes) and the corresponding open reading frames (ORFs). Typically, genomes naturally comprise 61 sense codons: GCT, GCC, GCA, GCG, CGT, CGC, CGA, CGG, AGA, AGG, AAT, AAC, GAT, GAC, TGT, TGC, CAA, CAG, GAA, GAG, GGT, GGC, GGA, GGG, CAT, CAC, ATT, ATC, ATA, TTA, TTG, CTT, CTC, CTA, CTG, AAA, AAG, ATG, TTT, TTC, CCT, CCC, CCA, CCG, TCT, TCC, TCA, TCG, AGT, AGC, ACT, ACC, ACA, ACG, TGG, TAT, TAC, GTT, GTC, GTA, and GTG (read from 5′ to 3′ on the coding strand of DNA). The standard genetic code encodes the 20 canonical amino acids using the 61 triplet codons. 18 of the 20 amino acids are encoded by more than one synonymous codon. The first or second type of sense codon may be native sense codons, i.e. sense codons which are present in the parent genome.

[0186] The 61 sense codons in DNA are transcribed into corresponding mRNA and subsequently decoded by one or more tRNAs. tRNAs carry an amino acid to a ribosome as directed by the sense codons in the mRNA. The tRNAs can recognise one or more sense codons via a complementary anticodon. A sequence of sense codons is subsequently translated into a polypeptide (i.e. a sequence of amino acids). Codon and anticodon interactions in the E. coli genome are shown in FIG. 17 of WO2020/229592 (incorporated herein by reference).

[0187] The genome wide removal of the first and/or second type of sense codon, but not other sense codons, enables cognate tRNAs corresponding to said first or second type of sense codons to be deleted without removing the ability to decode the sense codons remaining in the genome.

[0188] The recoded sense codons may be selected from: TCG, TCA, TCT, TCC, AGT, or AGC. In a particular embodiment, the first and second type of sense codon are TCA and TCG.

[0189] To achieve removal of sense codons they may be replaced with synonymous sense codons. This is preferable to ensure that the encoded protein sequence is not changed. For instance, the cell may have a genome wherein 90% or more, 95% or more, 98% or more, 99% or more, 99.5% or more, 99.6% or more, 99.7% or more, 99.8% or more, 99.9% or more, or 100% of the occurrences of the first or second type of sense codons in the parent genome is replaced with synonymous sense codons. The person skilled in the art is able to deduce suitable synonymous sense codon replacements. For example, in E. coli, typically TCG, TCA, TCT, TCC, AGT and AGC all encode serine.

[0190] In some embodiments, the replacement is a defined replacement, i.e., one sense codon is replaced with a single synonymous sense codon. Preferably, 90% or more, 95% or more, 98% or more, 99% or more, 99.5% or more, 99.6% or more, 99.7% or more, 99.8% or more, 99.9% or more, or 100% of the natural occurrences of the first or second type of sense codon in the parent genome are is replaced with a defined (i.e. single) synonymous sense codon.

[0191] For example, the defined replacement may be: TCG replaced with any one of TCT, TCC, AGT, or AGC; or TCA replaced with any one of TCT, TCC, AGT, or AGC. In particular, the replacements are selected from one or more of: TCG to either AGT or AGC; or TCA to either AGT or AGC. In a particular embodiment, TCG is replaced with AGC and TCA is replaced with AGT.

[0192] Preferably, none of these codon replacements affect ribosomal binding sites (AGGAGG), which are highly conserved regulatory sequences in E. coli. The selected codon replacements may be tested on a small test region (e.g. a 20 kb region of the genome rich in both essential target genes and target codons) to assess viability. If the codon replacements are not viable on the small test region they may be disregarded.

[0193] When replacement of sense codons in the parent genome with defined replacement synonymous sense codons does not result in a viable cell, alternative replacement synonymous sense codons may be used. For instance, 99.9% of the occurrences of the first and/or second type of sense codon in the parent genome may be replaced with a defined (i.e. single) synonymous sense codon, and the remaining 0.1% with alternative synonymous sense codons. For example, 99.9% of the natural occurrences of TCG may be replaced with AGC and 0.1% replaced with TCT, TCC, AGT or AGC; and/or 99.9% of the occurrences of TCA may be replaced with AGT and 0.1% replaced with TCT, TCC, AGT or AGC.

[0194] In some instances, a particular occurrence of a sense codon may not be replaceable with any of the potential synonymous sense codons without affecting viability. To retain viability, the sense codon may be replaced with a non-synonymous sense codon that does not affect viability. For instance, 99.9% of the occurrences of the first and/or second type of sense codon in the parent genome may be replaced with a defined (i.e. single) synonymous sense codon, and the remaining 0.1% with alternative non-synonymous sense codons.

### Recoding of Stop Codons

[0195] This section further describes exemplary embodiments involving recoding stop codons, and is applicable to all aspects disclosed herein.

[0196] In some examples, a first type of stop codon has been recoded within the genome of the cell such that the first endogenous release factor is dispensable, and the cell does not express a first endogenous release factor.

[0197] The removal of the first endogenous release factor may performed in cells wherein the genomes have been recoded to remove occurrences of a first type of stop codon. Optionally the removed stop codons are replaced with synonymous codons. The deleted endogenous release factor is the factor that is dispensable in light of the recoding.

[0198] In a particular examples, the cell does not express a first endogenous tRNA, a second endogenous tRNA, and a first endogenous release factor; and the genome has been recoded to remove a plurality of the sense codons for which the first and second endogenous tRNAs are cognate, and to remove a plurality of the stop codon for which the first endogenous release factor is cognate.

[0199] An endogenous release factor is considered to be not expressed if the endogenous release factor is not present in a form that would allow it to decode its cognate codon(s). Thus, an endogenous release factor may be removed using any manner that would prevent the production of a functional form of the endogenous release factor within the cell. For instance, the endogenous gene may be deleted or a portion of the gene may be deleted to prevent expression. Regulatory sequences may be deleted or altered to prevent expression. Alternatively, nonsense, frameshift, or missense mutations may prevent expression of the release factor in a functional form.

[0200] As used herein, a “stop codon” is a nucleotide triplet that codes for termination of translation into proteins. Typically, genomes naturally comprise 3 stop codons: TAA (“ochre”), TGA (“opal” or “umber”) and TAG (“amber”).

[0201] The number of natural occurrences of the first type of stop codon that are removed is adequate to enable the removal of the cognate release factor corresponding to said stop codons while maintaining viability of the cell. Thus, in some examples, the essential genes of the cell do not contain occurrences of the first type of stop codon. The essential genes may be any as discussed herein, particularly those discussed in relation to the removal of the first or second type of sense codon. In particular examples, the genome comprises 100 or more, 200 or more, or 300 or more essential genes with no natural occurrences of the first type of stop codon. For instance, all or substantially all of the essential genes in the genome may comprise no occurrences of the first type of stop codon.

[0202] For example, the genome may comprise 100 or more, 200 or more, or 300 or more essential genes with no natural occurrences of the first type of sense codon, the second type of sense codon, and the first type of stop codon. In particular, all or substantially all of the essential genes in the genome may comprise no natural occurrences of the first type of sense codon, the second type of sense codon, and the first type of stop codon.

[0203] In some embodiments, the genome comprises 10 or fewer, 5 or fewer, or no natural occurrences of the first type of stop codon. Such as 5, 4, 3, 2, 1, or no natural instances of the first type of stop codon.

[0204] In a particular example the first type of stop codon is TAG and the first endogenous release factor is RF-1. In such examples, there may be 10 or fewer, 5 or fewer, or no natural occurrences of the amber stop codon (TAG). In other examples, 90% or more, 95% or more, 98% or more, 99% or more, or all of the occurrences of TAG in the parent genome are replaced with TAA (the ochre stop codon). In particular embodiments, the genome comprises no occurrences of the amber stop codon (TAG), optionally wherein all of the occurrences of TAG in the parent genome are replaced with TAA (the ochre stop codon).

[0205] In an embodiment, all annotated open reading frames within the genome have no occurrences of the first type of stop codon. The cell of the present disclosure may be a bacterial cell, such as E. coli, and the genome of the E. coli may contain no occurrences of first type of stop codon as annotated in GenBank accession number CP040347.1.

[0206] In some examples, the protein-encoding genes have no natural occurrences of the first type of stop codon. In particular examples, no proteins are translated from any of the remaining occurrences of the first type of stop codon and/or genes comprising the remaining occurrences of the first type of stop codon are putative or are non-coding genes. In some examples the translation of the genes comprising the remaining occurrences of the first type of stop codon is reduced and/or prevented (e.g. the genes may comprise stop codons in the 5′ sequence).

[0207] Any remaining occurrences of the first type of stop codon may be necessary to ensure that the genome is viable. For example, one or more, in particular all, of the remaining natural occurrences of the first type of stop codon in the genome may be present in the regulatory elements of essential genes; and/or one or more, in particular all, of the remaining occurrences of the first type of stop codon may be in genes in which there is no evidence for translation or the predicted protein product (i.e. putative or non-coding genes).

### Genomes Recoded for Sense Codons and Stop Codons

[0208] This section further describes exemplary embodiments of the recoding, and is applicable to the all aspects disclosed herein.

[0209] Accordingly, in some examples the genome comprises no occurrences of a first and a second type of sense codon, and no occurrences of one stop codon, preferably the amber stop codon (TAG). In particular examples, the genome comprises no occurrences of the sense codons TCG and TCA, and no occurrences of the amber stop codon (TAG), optionally wherein TCG, TCA and TAG in the parent genome are replaced with synonymous codons, for example 99.9% or more of the occurrences of TCG in the parent genome are replaced with AGC, 99.9% or more of the occurrences of TCA in the parent genome are replaced with AGT and all of the occurrences of TAG in the parent genome are replaced with TAA.

[0210] In a particular example, the genome of the cell has been recoded such that the sense codon TCG has been replaced with AGC, the sense codon TCA has been replaced with AGT, and the stop codon TAG has been replaced with TAA, and wherein sufficient numbers of said codons have been recoded such that two cognate tRNAs and a cognate release factor are dispensable.

[0211] In a particular example, the cell of the present disclosure is an E. coli cell that does not express tRNA^{Ser}_{UGA}, tRNA^{Ser}_{CGA}, or RF-1, occurrences of the sense codon TCA have been recoded such that tRNA^{Ser}_{UGA} is dispensable (e.g. occurrences of TCA in essential genes of the parent strain have been replaced with AGT), occurrences of the sense codon TCG have been recoded such that tRNA^{Ser}_{CGA} is dispensable (e.g. occurrences of TCG in essential genes of the parent strain have been replaced with AGC), and occurrences of the stop codon TAG have been recoded such that RF-1 is dispensable (e.g. occurrences of TAG in essential genes of the parent strain have been replaced with TAA).

[0212] In some embodiments the genome of the cell of the present disclosure comprises a polynucleotide sequence which is at least 80%, 85%, 90%, 95%, 98%, 99%, 99.5%, 99.8%, 99.9%, or 100% identical to the sequence provided in GenBank accession number CP040347.1, and wherein the genome has been further altered such that tRNA^{Ser}_{UGA} and tRNA^{Ser}_{CGA} are not functionally expressed (for instance, by deleting serT and serU). The genome may have been even further altered such that RF-1 is not functionally expressed (for instance, by deleting prfA). An E. coli strain comprising a genome according to GenBank accession number CP040347.1 is referred to as Syn61 WT in the Examples disclosed herein.

[0213] In some embodiments the genome of the cell of the present disclosure comprises a polynucleotide sequence which is at least 80%, 85%, 90%, 95%, 98%, 99%, 99.5%, 99.8%, 99.9%, or 100% identical to SEQ ID NO: 1, and wherein the genome has been further altered such that tRNA^{Ser}_{UGA} and tRNA^{Ser}_{CGA} are not functionally expressed (for instance, by deleting serT and serU). The genome may have been even further altered such that RF-1 is not functionally expressed (for instance, by deleting prfA). An E. coli strain comprising a genome according to SEQ ID NO: 1 may be referred to as Syn61(ev1).

[0214] In some embodiments the genome of the cell of the present disclosure comprises a polynucleotide sequence which is at least 80%, 85%, 90%, 95%, 98%, 99%, 99.5%, 99.8%, 99.9%, or 100% identical to SEQ ID NO: 2, and wherein the genome has been further altered such that tRNA^{Ser}_{UGA} and tRNA^{Ser}_{CGA} are not functionally expressed (for instance, by deleting serT and serU). The genome may have been even further altered such that RF-1 is not functionally expressed (for instance, by deleting prfA). An E. coli strain comprising a genome according to SEQ ID NO: 2 may be referred to as Syn61(ev2).

[0215] In some embodiments the genome of the cell comprises a polynucleotide sequence which is at least 80%, 85%, 90%, 95%, 98%, 99%, 99.5%, 99.8%, 99.9%, or 100% identical to SEQ ID NO: 3. An E. coli strain comprising a genome according to SEQ ID NO: 3 may be referred to as Syn61Δ3.

[0216] In some embodiments the genome of the cell comprises a polynucleotide sequence which is at least 80%, 85%, 90%, 95%, 98%, 99%, 99.5%, 99.8%, 99.9%, or 100% identical to SEQ ID NO: 4. An E. coli strain comprising a genome according to SEQ ID NO: 4 may be referred to as Syn61Δ3(ev3).

[0217] In some embodiments the genome of the cell comprises a polynucleotide sequence which is at least 80%, 85%, 90%, 95%, 98%, 99%, 99.5%, 99.8%, 99.9%, or 100% identical to SEQ ID NO: 5. An E. coli strain comprising a genome according to SEQ ID NO: 5 may be referred to as Syn61Δ3(ev4).

[0218] In some embodiments the genome of the cell comprises a polynucleotide sequence which is at least 80%, 85%, 90%, 95%, 98%, 99%, 99.5%, 99.8%, 99.9%, or 100% identical to SEQ ID NO: 6 (also provided as GenBank accession number CP071799.1). An E. coli strain comprising a genome according to SEQ ID NO: 6 may be referred to as Syn61Δ3(ev5).

[0219] There is provided herein a prokaryotic cell comprising a genome which is at least 80%, 85%, 90%, 95%, 98%, 99%, 99.5%, 99.8%, 99.9%, or 100% identical to any one of: SEQ ID NO: 1, SEQ ID NO: 2, SEQ ID NO: 3, SEQ ID NO: 4, SEQ ID NO: 5, and SEQ ID NO: 6. The prokaryotic cell may be a bacterium, for instance E. coli. In some embodiments, the calculation of the sequence identity percentage excludes any sequence that has been inserted to further modify the cells. The calculation of sequence identity percentage may further exclude any exogenous sequences that have been further introduced into the genome. For instance, any additional tRNAs, selection markers, changes to genes required for viability according to the present disclosure, constructs for the industrial expression of peptide or protein products, etc.

### Species of Cells

[0220] The cell of the present disclosure, including those of all aspects disclosed herein, may be a prokaryotic cell. The bacterial cell may be of any species suitable for heterologous protein production, in particular the production of polypeptides. Suitable bacterial host cells include: Escherichia (e.g. Escherichia coli), caulobacteria (e.g. Caulobacter crescentus), phototrophic bacteria (e.g. Rhodobacter sphaeroides), cold adapted bacteria (e.g. Pseudoalteromonas haloplanktis, Shewanella sp. strain Ac10), pseudomonads (e.g. Pseudomonas fluorescens, Pseudomonas putida, Pseudomonas aeruginosa), halophilic bacteria (e.g. Halomonas elongate, Chromohalobacter salexigens), streptomycetes (e.g. Streptomyces lividans, Streptomyces griseus), Nocardia (e.g. Nocardia lactamdurans), mycobacteria (e.g. Mycobacterium smegmatis), coryneform bacteria (e.g. Corynebacterium glutamicum, Corynebacterium ammoniagenes, Brevibacterium lactofermentum), bacilli (e.g. Bacillus subtilis, Bacillus brevis, Bacillus megaterium, Bacillus licheniformis, Bacillus amyloliquefaciens), vibrio bacteria (e.g. Vibrio cholera, Vibrio natriegens), and lactic acid bacteria (e.g. Lactococcus lactis, Lactobacillus plantarum, Lactobacillus casei, Lactobacillus reuteri, Lactobacillus gasseri). In some examples, the bacterium is a gram-negative bacterium.

[0221] In particular examples, the bacterium is an Escherichia coli, Salmonella enterica, or Shigella dysenteriae. More preferably, the cell is an E. coli. Suitable E. coli cells include K-12, MG1655, BL21, BL21(DE3), AD494, Origami, HMS174, BLR(DE3), HMS174(DE3), Tuner(DE3), Origami2(DE3), Rosetta2(DE3), Lemo21(DE3), NiCo21(DE3), T7 Express, SHuffle Express, C41(DE3), C43(DE3), and m15 pREP4 or derivatives thereof (Rosano, G. L. and Ceccarelli, E. A., 2014. Frontiers in microbiology, 5, p. 172). In particular, the cell may be MG1655 or BL21, or a derivative thereof. MG1655 is considered as the wild type strain of E. coli. The GenBank ID of genomic sequence of this strain is U00096. BL21 is widely available commercially. For example, it can be purchased from New England BioLabs with catalog number C2530H.

[0222] The cell may contain a genome which is derived from the same species or strain, or may be derived from a different species. For example, if the cell is E. coli the genome may be an E. coli genome.

[0223] The cell of the present disclosure, including those of all aspects disclosed herein, may be biocontained cells. Thus, the cells of the present disclosure may only be viable or capable of proliferation under conditions that are not found in nature. Such cells may be considered to comprise a biocontainment system.

[0224] For instance, the cells may be viable or capable of proliferating only in the presence of an agent that is not found in natural environments. Such cells are capable of being cultured in the presence of said agent but, if the cells were to be placed into an environment lacking the agent, would not be maintained as a population of cells. Examples of such agents includes unnatural amino acids, which may be required for functional translation of one or more essential gene. Other examples include ligands required for the expression or activity of essential genes/proteins.

[0225] In another example, the cells may comprise a gene that prevents viability or the ability to proliferate, wherein the gene is inactive in the presence of an agent that is not found in natural environments. This gene may be referred to as a “kill switch” and may, for example, encode a toxin.

### Production of Polymers

[0226] As disclosed herein, the cells of the present disclosure may be suitable for polymer production. Thus, in a seventh aspect of the present disclosure, there is provided use of any cell disclosed herein for the production of a polymer.

[0227] In an embodiment, there is provided a method for making a polymer, the method comprising: culturing a cell as disclosed herein, providing the cell with a nucleic acid sequence encoding the polymer, and obtaining the polymer.

[0228] The polymer may be a polypeptide. The polymer may be a heterologous protein. The polymer may comprise monomers that can be incorporated by a charged-tRNA, such as canonical amino acids, natural amino acids, unnatural amino acids, beta amino acids, hydroxy acids, alpha hydroxy acids, and the like.

### Further Information

[0229] Sequence comparisons can be conducted with the aid of readily available sequence comparison programs. These publicly and commercially available computer programs can calculate sequence identity between two or more sequences.

[0230] The skilled technician will appreciate how to calculate the percentage identity between two nucleic sequences. In order to calculate the percentage identity between two nucleic sequences, an alignment of the two sequences must first be prepared, followed by calculation of the sequence identity value. The percentage identity for two sequences may take different values depending on: (i) the method used to align the sequences, for example, the Needleman-Wunsch algorithm (e.g. as applied by Needle(EMBOSS) or Stretcher(EMBOSS), the Smith-Waterman algorithm (e.g. as applied by Water(EMBOSS)), or the LALIGN application (e.g. as applied by Matcher(EMBOSS); and (ii) the parameters used by the alignment method, for example, local versus global alignment, the matrix used, and the parameters applied to gaps.

[0231] Having made the alignment, there are many different ways of calculating percentage identity between the two sequences. For example, one may divide the number of identities by: (i) the length of shortest sequence; (ii) the length of alignment; (iii) the mean length of sequence; (iv) the number of non-gap positions; or (iv) the number of equivalenced positions excluding overhangs. Furthermore, it will be appreciated that percentage identity is also strongly length-dependent. Therefore, the shorter a pair of sequences is, the higher the sequence identity one may expect to occur by chance.

[0232] A calculation of percentage identities between two nucleic acid sequences may then be calculated from such an alignment as (N/T)*100, where N is the number of positions at which the sequences share an identical residue, and T is the total number of positions compared including gaps but excluding overhangs.

[0233] The sequence alignment may be a pairwise sequence alignment. Suitable services include Needle (EMBOSS), Stretcher (EMBOSS), Water (EMBOSS), Matcher (EMBOSS), LALIGN, or GeneWise. In an example, the identity between two amino acid sequences may be calculated using the service Needle(EMBOSS) set to the default parameters, e.g. matrix (BLOSUM62), gap open (10), gap extend (0.5), end gap penalty (false), end gap open (10), and end gap extend (0.5). In another example, the identity between two amino acid sequences may be calculated using the service Matcher (EMBOSS) set to the default parameters, e.g. matrix (BLOSUM62), gap open (14), gap extend (4), alternative matches (1). In an example, the identity between two nucleic acid sequences may be calculated using the service Needle(EMBOSS) set to the default parameters, e.g. matrix (DNAfull), gap open (10), gap extend (0.5), end gap penalty (false), end gap open (10), and end gap extend (0.5). In another example, the identity between two nucleic acid sequences may be calculated using the service Matcher (EMBOSS) set to the default parameters, e.g. matrix (DNAfull), gap open (16), gap extend (4), alternative matches (1).

[0234] All of the features described herein (including any accompanying claims, abstract and drawings), and/or all of the steps of any method or process so disclosed, may be combined with any of the above aspects in any combination, except combinations where at least some of such features and/or steps are mutually exclusive.

[0235] For a better understanding of the invention, and to show how embodiments of the same may be carried into effect, reference will now be made to the Examples, which are not intended to limit the invention in any way.

[0236] Some embodiments of the invention may be defined by the following clauses.

[0237] 1. A cell that:
[0238] comprises a genome wherein at least a first type of sense codon has been recoded such that a first endogenous tRNA is dispensable;
[0239] does not express the first endogenous tRNA;
[0240] expresses a first modified tRNA capable of decoding the first type of sense codon, wherein the first modified tRNA is charged with a first amino acid that is not a naturally cognate amino acid for the first type of sense codon; and
[0241] comprises a gene required for viability, wherein the gene comprises at least one occurrence of the first type of sense codon and the cell is viable when the first type of sense codon in said gene is decoded as the first amino acid.

[0242] 2. The cell of clause 1, wherein the cell is not viable if the first type of sense codon in the gene required for viability is decoded according to the canonical genetic code, or wherein the first type of sense codon in the gene required for viability at least partially contributes to a loss of viability if decoded according to the canonical genetic code.

[0243] 3. The cell of clause 1 or clause 2, wherein the gene required for viability is an essential gene or a positive selectable marker.

[0244] 4. The cell of any one of clauses 1 to 3, wherein the first amino acid is a naturally occurring amino acid.

[0245] 5. The cell of any one of clauses 1 to 4, wherein a second type of sense codon has been recoded within the genome; optionally wherein a second endogenous tRNA is dispensable and the cell does not express the second endogenous tRNA; and optionally wherein the cell expresses a second modified tRNA, which is capable of decoding the second type of sense codon, wherein the second modified tRNA is charged with a second amino acid that is not a naturally cognate amino acid for the second type of sense codon.

[0246] 6. The cell of clause 5, wherein a gene required for viability comprises at least one occurrence of the second type of sense codon and the cell is viable when the second type of sense codon in said gene is decoded as the second amino acid.

[0247] 7. The cell of clause 6, wherein the cell is not viable if the second type of sense codon in the gene required for viability is decoded according to the canonical genetic code, or wherein the second type of sense codon at least partially contributes to a loss of viability if decoded according to the canonical genetic code.

[0248] 8. The cell of any one of clauses 5 to 7, wherein the second amino acid is a naturally occurring amino acid.

[0249] 9. The cell of any one of clauses 1 to 8, wherein the cell is viable when its genes are decoded by the modified tRNA(s) and is non-viable when its genes are decoded at least partially according to the canonical genetic code.

[0250] 10. A cell with increased resistance to horizontal gene transfer or mobile genetic elements, wherein the cell has been modified to reassign at least one type of sense codon to an amino acid not associated with the sense codon in the canonical genetic code, and the cell comprises a gene required for viability that is functional when decoded according to the reassigned genetic code and is not functional when decoded according to the canonical genetic code.

[0251] 11. A cell that:
[0252] comprises a genome wherein a first type of sense codon and a second type of sense codon have been recoded such that a first endogenous tRNA and a second endogenous tRNA are dispensable;
[0253] does not express the first endogenous tRNA and the second endogenous tRNA;
[0254] expresses a first anticodon-swapped tRNA derived from a naturally occurring first parent tRNA, wherein the first anticodon-swapped tRNA is charged with a first amino acid and the first parent tRNA is an isoacceptor for the first amino acid, and wherein the first amino acid is not a naturally cognate amino acid for the first type of sense codon; and
[0255] expresses a second anticodon-swapped tRNA derived from a naturally occurring second parent tRNA, wherein the second anticodon-swapped tRNA is charged with a second amino acid and the second parent tRNA is an isoacceptor for the second amino acid, and wherein the second amino acid is not a naturally cognate amino acid for the second type of sense codon;
   wherein the first and/or second modified tRNA cannot decode any type of codon apart from the first type of sense codon and/or the second type of sense codon.

[0256] 12. The cell of clause 11, wherein:
[0257] the first and second type of sense codon would canonically be decoded by the same tRNA or overlapping tRNAs due to wobble base pairing, wherein the first anticodon-swapped tRNA cannot decode any codon type apart from the first type of sense codon and/or the second anticodon-swapped tRNA cannot decode any codon type apart from the second type of sense codon; and/or
[0258] the first type of sense codon and the second type of sense codon are of the formula XXN, and wherein the first anticodon-swapped tRNA cannot decode the second type of sense codon, and the second anticodon-swapped tRNA cannot decode the first type of sense codon.

[0259] 13. The cell of clause 11 or clause 12, wherein the first amino acid and the second amino acid are different types of amino acid.

[0260] 14. The cell of any one of clauses 11 to 13, wherein the first and second parent tRNAs are derived from the same cell type as the cell of clause 11; optionally wherein the first and/or second anticodon-swapped tRNA comprise identity elements that are recognised by an aminoacyl-tRNA synthetase endogenous to the cell.

[0261] 15. The cell of any one of clauses 11 to 14, wherein the first and the second type of sense codon canonically encode serine, the first and the second type of sense codon canonically encode alanine, or the first and the second type of sense codon canonically encode leucine.

[0262] 16. The cell of any one of clauses 11 to 15, wherein the first and/or second anticodon-swapped tRNA does not decode TCC or TCT codons.

[0263] 17. The cell of any one of clauses 11 to 16, wherein the first and/or second amino acid is a naturally occurring amino acid; optionally wherein the first amino acid is any one of alanine, histidine, leucine, and proline; and/or the second amino acid is any one of alanine, histidine, leucine, and proline.

[0264] 18. A cell that:
[0265] comprises a genome wherein a first type of sense codon and a second type of sense codon have been recoded such that a first endogenous tRNA and a second endogenous tRNA are dispensable;
[0266] does not express the first endogenous tRNA and the second endogenous tRNA;
[0267] expresses a first modified tRNA capable of decoding the first type of sense codon, wherein the first modified tRNA is charged with a first amino acid that is not a naturally cognate amino acid for the first type of sense codon; and
[0268] expresses a second modified tRNA capable of decoding the second type of sense codon, wherein the second modified tRNA is charged with a second amino acid that is not a naturally cognate amino acid for the second type of sense codon;
   wherein:
[0269] i) the first amino acid is alanine and the second amino acid is alanine;
[0270] ii) the first amino acid is alanine and the second amino acid is histidine;
[0271] iii) the first amino acid is alanine and the second amino acid is leucine;
[0272] iv) the first amino acid is alanine and the second amino acid is proline;
[0273] v) the first amino acid is histidine and the second amino acid is alanine;
[0274] vi) the first amino acid is histidine and the second amino acid is histidine;
[0275] vii) the first amino acid is histidine and the second amino acid is leucine;
[0276] viii) the first amino acid is histidine and the second amino acid is proline;
[0277] ix) the first amino acid is leucine and the second amino acid is alanine;
[0278] x) the first amino acid is leucine and the second amino acid is histidine;
[0279] xi) the first amino acid is leucine and the second amino acid is proline;
[0280] xii) the first amino acid is proline and the second amino acid is alanine;
[0281] xiii) the first amino acid is proline and the second amino acid is histidine;
[0282] xiv) the first amino acid is proline and the second amino acid is leucine; or
[0283] xv) the first amino acid is proline and the second amino acid is proline.

[0284] 19. The cell of clause 18, wherein
[0285] the first modified tRNA cannot decode the second type of sense codon and/or the second modified tRNA cannot decode the first type of sense codon; and/or
[0286] the first modified tRNA cannot decode any type of codon apart from the first type of sense codon and/or the second modified tRNA cannot decode any type of codon apart from the second type of sense codon.

[0287] 20. The cell of clause 18 or clause 19, wherein the first modified tRNA is an anticodon-swapped tRNA canonically associated with the first amino acid, and/or the second modified tRNA is an anticodon-swapped tRNA canonically associated with the second amino acid.

[0288] 21. The cell of any one of clauses 18 to 20, wherein
[0289] the first modified tRNA is derived from a tRNA that is endogenous to the cell and is an isoacceptor for the first amino acid, or is derived from a tRNA found in a mobile genetic element and is an isoacceptor for the first amino acid; and/or
[0290] the second modified tRNA is derived from a tRNA that is endogenous to the cell and is an isoacceptor for the second amino acid, or is derived from a tRNA found in a mobile genetic element and is an isoacceptor for the second amino acid; and/or
[0291] the first and/or second modified tRNA comprise identity elements that are recognised by an aminoacyl-tRNA synthetase endogenous to the cell.

[0292] 22. The cell of any one of clauses 18 to 21, wherein the first and the second type of sense codon canonically encode serine.

[0293] 23. The cell of any one of clauses 18 to 22, wherein the first type of sense codon is TCA and/or the second type of sense codon is TCG.

[0294] 24. The cell of any preceding clause, wherein the cell is prokaryotic cell, a bacterial cell, or an Escherichia coli cell.

[0295] 25. A method of increasing the resistance of a cell to mobile genetic elements or horizontal gene transfer, wherein the cell has been modified to reassign at least one type of sense codon to an amino acid not associated with the sense codon in the canonical genetic code, said method comprising:
[0296] modifying a gene required for viability to include at least one occurrence of the reassigned sense codon, wherein
[0297] the cell is viable if the reassigned sense codon in said gene is decoded as the reassigned amino acid, and
[0298] the cell is not viable if the reassigned sense codon in said gene is decoded according to the canonical genetic code, or wherein the reassigned sense codon in said gene at least partially contributes to a loss of viability if decoded according to the canonical genetic code.

### EXAMPLES

### Summary

[0299] The near-universal genetic code defines the correspondence between codons in genes and amino acids in proteins. It is widely hypothesized that refactoring the structure of the genetic code will create organisms with new properties, and may create a genetic firewall to limit the escape of genetic information from synthetic organisms. However, it has been impossible to test these hypotheses. Here we create refactored genetic code/decoder systems, which—unlike code-compressed organisms—exhibit semantic- and functional-orthogonality with respect to the code/decoder system for the canonical code. We thereby create orthogonal, and mutually orthogonal, horizontal gene transfer systems, which permit the transfer of genetic information between organisms that use the same genetic code, but restrict transfer of genetic information between cells that use different genetic codes. Moreover, we show that locking an orthogonal code into synthetic organisms completely blocks invasion by mobile genetic elements that successfully invade code-compressed organisms.

[0300] To elaborate, we show that code compressed genes are read in natural cells, such that code compression cannot limit the escape of genes from engineered organisms into the biosphere. Moreover, we show that mobile genetic elements that use the canonical genetic code, and carry the tRNA decoders necessary to complement the tRNAs absent in the recipient cell, can invade Syn61Δ3 cells. We reassign sense codons to alternative canonical amino acids in Syn61Δ3, and thereby refactor the structure of the genetic code; we create 16 refactored codes with features not found in nature. We demonstrate that code reassignment enables the creation of synthetic genes, written in new codes, which are correctly read in synthetic organisms with cognate decoders, but incorrectly read in natural cells. We also show that genes written in the canonical code, which are correctly read in natural organisms, are incorrectly read in the synthetic organism. The genetic code-decoder system in the synthetic organism exhibits semantic- and functional-orthogonality with respect to the code-decoder system for the canonical code. We leverage this orthogonality to create orthogonal, and mutually orthogonal, horizontal gene transfer systems that permit the horizontal transfer of genetic information between cells that use the same genetic code, but restrict horizontal transfer of genetic information between cells that use different genetic codes. Moreover, we show that locking an orthogonal code into the synthetic organism completely blocks invasion by mobile genetic elements that successfully invade code-compressed organisms.

### Example 1—Compressed Codes are Non-Orthogonal

[0301] A spectinomycin resistance gene written in the canonical genetic code (SpecR WT) was correctly read in cells that contain the full complement of tRNAs to read the canonical code, and conferred spectinomycin resistance to WT cells (Syn61 WT). However, consistent with previous observations (18), SpecR WT did not confer spectinomycin resistance to Syn61Δ3 cells, (FIG. 1), as Syn61Δ3 does not read all the codons in the canonical genetic code.

[0302] We created a spectinomycin resistance gene (recSpecR (ΔTCG, TCA)), written using the compressed genetic code we used to create Syn61 (TCG and TCA codons were replaced with AGC and AGT respectively, and the TAG stop codon was replaced with TAA). recSpecR (ΔTCG, TCA) conferred spectinomycin resistance to Syn61Δ3 cells, which use the same codon compression scheme as recSpecR (ΔTCG, TCA) in their genome (FIG. 1). The recSpecR (ΔTCG, TCA) gene also conferred spectinomycin resistance to cells that read the canonical genetic code; this was expected, as the compressed genetic code uses a subset of the codons used in the canonical genetic code. We made similar observations with codon compressed- and wt-hygromycin resistance genes (FIG. S1).

[0303] These experiments demonstrated that genetic information written in the canonical code can be read in WT cells, but not in cells with genome-wide code compression and cognate tRNA deletion. However, code compressed genes can be read in both cells with genomic code compression and cognate tRNA deletion and in WT cells. The codons used in the compressed genetic code are not orthogonal with respect to the tRNA decoders in WT cells. Therefore, there is no barrier limiting genetic information from engineered biological cells—that use compressed genetic codes—being read by natural forms of life that use the canonical code. Creating orthogonal genetic codes, with active barriers restricting the transfer of genetic information from engineered biological systems to natural systems, is an important and unaddressed challenge.

### Example 2—tRNAs Enable Invasion of Codon Compressed Organisms

[0304] A WT F plasmid (F (WT), which uses the canonical genetic code, was efficiently transferred to WT cells. In contrast, F (WT) was not transferred to Syn61Δ3 (FIG. 1), as expected. However, upon selecting for the conjugation of F (WT) from WT cells into Syn61Δ2 cells (Syn61 cells deleted for serU and serT but containing prfA), we obtained two viable colonies in which recipient cells had received F (WT) (FIG. S2). These colonies corresponded to rare events, appearing at a frequency 10⁶ fold lower than the colonies resulting from conjugation of F (WT) into WT cells. Sequencing the two clones revealed that they had acquired sequences containing serT from the donor cell. This provided direct experimental evidence that selection for transfer of a mobile genetic element that uses the canonical code into cells can enable the selection for the tRNA genes required to read the canonical genetic code.

[0305] To follow the effects of introducing serT into recipient cells in a reproducible system, we created the mobile genetic element F (WT+serT), a variant of F (WT) that contains serT. We demonstrated that F (WT+serT) can be transferred to Syn61Δ3 cells, and that this transfer is dependent on serT (FIG. 1). We conclude that acquisition of serT is sufficient to circumvent genetic isolation provided by codon compression and cognate tRNA deletion in Syn61Δ3. These experiments highlight that creating systems that actively obstruct invasion by mobile genetic elements that carry their own decoders is an important challenge.

### Example 3—Refactoring Code-Structure

[0306] serU, encoding tRNA_{CGA}^{Ser}, and serT, encoding tRNA_{UGA}^{Ser}, both decode TCG and TCA codons and incorporate serine into proteins in Syn61Δ3 (FIG. S3). To reassign the TCG and TCA codons to distinct natural amino acids in Syn61Δ3, we created variants of the isoacceptor tRNAs for canonical amino acids; for each isoacceptor we altered the anticodon to CGA or UGA. We measured the activity of these chimeric tRNAs for decoding TCG or TCA codons at position 3 of an sfGFP gene (a known permissive site) in Syn61Δ3 (FIG. S3). We found that chimeric tRNAs for Ala (tRNA_{CGA}^{Ala}, tRNA_{UGA}^{Ala}), His (tRNA_{CGA}^{His}, tRNA_{UGA}^{His}), Leu (tRNA_{CGA}^{Leu}, tRNA_{UGA}^{Leu}) and Pro (tRNA_{CGA}^{Leu}, tRNA_{UGA}^{Leu}) specifically direct the incorporation of the amino acid defined by the parent isoacceptor tRNA in response to their cognate codon (TGC or TCA) at position 3 in sfGFP or position 11 in ubiquitin in Syn61Δ3 (FIG. 2, FIGS. 8, 12-21), and produce good yields of protein (FIG. S3). We note that the fidelity of tRNA_{UGA}^{Leu} was lower than that of other tRNAs (FIG. 13). Alanyl and leucyl-tRNAs were investigated since their anticodons are not identity elements for their cognate aminoacyl-tRNA synthetases and they were therefore expected to be permissive to anticodon mutation; the other tRNAs were identified through a screen (FIG. 22). We also found that, unlike tRNA_{CGA}^{Ser} and tRNA_{UGA}^{Ser}, our chimeric tRNAs specifically decode the Watson-Crick complement of their anticodon sequence; for example, tRNA_{CGA}^{Ala} decodes TCG codons in preference to TCA codons and tRNA_{UGA}^{Ala} decodes TCA codons in preference to TCG codons (FIG. S3, FIG. 13). These tRNAs are also specific with respect to other TCN codons (FIG. 14, FIG. 15), and most reassigned strains grew comparably to parental strains (FIG. 23). Therefore, we can independently re-assign the TCA and TCG codons to Ala, His, Leu or Pro in Syn61Δ3 and thereby create 16 new genetic codes (FIG. S3, Data File S1, FIG. 2B). In each new genetic code we changed the identity of the canonical amino acids encoded at specific sense codons with respect to both the canonical code and the other 15 codes we have created (FIG. 2C).

[0307] Overall we have refactored the structure of the genetic code. Our new genetic codes expand the number of codons used to encode Ala and Pro (from 4 to 6), double the number of codons used to encode His, from 2 to 4, and an increase the number of codons used to encode Leu from 6 to 8; this is more codons than are used to encode any amino acid in the canonical code. These experiments also show that the UCN codon box, which encodes serine in the canonical code, can be split to encode additional canonical amino acids.

### Example 4—Orthogonal Code-Orthogonal Decoder Pairs

[0308] Genes written using the canonical genetic code, in which TCG and TCA codons encode serine, will make the correct protein product in natural cells that read these codons as serine. However, these genes will yield the incorrect—likely non-functional—protein product in cells that decode these codons to incorporate amino acids other than serine.

[0309] Similarly, synthetic genes—in which we compress the genetic code using the Syn61 recoding scheme and replace codons for specific natural amino acids with TCG and TCA codons—will make the correct protein product in cells that decode the TCG and TCA codons to incorporate the correct amino acid. However these synthetic genes will yield an incorrect—likely non-functional—protein product in cells that read the natural genetic code (FIG. 3).

[0310] We converted all 27 GCN codons (which encode alanine in the canonical code) to TCG codons, and all 6 CAT/C codons (which encode histidine in the canonical code) to TCA codons in recSpecR (ΔTCG, TCA). This created the orthogonal resistance gene O-SpecR (TCG-Ala, TCA-His). We demonstrated that O-SpecR (TCG-Ala, TCA-His) can be decoded in, and confer spectinomycin resistance to, Syn61Δ3 (tRNA_{CGA}^{Ala}, tRNA_{UGA}^{His}) cells, in which TCG is read as Ala and TCA is read as His. We further demonstrated that O-SpecR (TCG-Ala, TCA-His) did not confer spectinomycin resistance to Syn61 WT cells, in which TCG and TCA are decoded as Ser, as in the canonical genetic code. Finally, we demonstrated that SpecR WT, in which serine is encoded using TCG and TCA codons, cannot confer spectinomycin resistance to Syn61Δ3 (tRNA_{CGA}^{Ala}, tRNA_{UGA}^{His}) cells (FIG. 3). We extended this approach to five other reassignment schemes, as well as to other genes (FIG. 9). We obtained similar results (FIG. S4B) with a wt hygromycin resistance gene, and a hygromycin resistance gene in which all Ala codons had been converted to TCG and all histidine codons had been converted to TCA (O-HygR (TCG-Ala, TCA-His)).

[0311] These experiments demonstrated that we can create a genetic code-decoder pair for synthetic genes that is functionally orthogonal with respect to the canonical genetic code-decoder pair for natural genes. The orthogonal code (TCG-Ala, TCA-His), written in synthetic genes, is correctly read by the orthogonal decoder (tRNA_{CGA}^{Ala}, tRNA_{UGA}^{His}), but not by the canonical decoder (tRNA_{UGA}^{Ser}). The canonical code (TCG-Ser, TCA-Ser), written in natural genes, is correctly read by the canonical decoder, but not by the orthogonal decoder.

[0312] The functional orthogonality of genes in cells with altered decoders will depend on the frequency of reassigned codons and the functional consequences of codon reassignments. The consequences of amino acid substitutions—a result of codon reassignment—may globally, and crudely, correlate with differences in amino acid polarity and hydrophobicity (6, 21). The consequences of amino acid substitutions at particular sites in proteins may be predicted using computational approaches that leverage evolutionary sequence- and/or structural-information (22-25). While the composition of natural genes is fixed, the codon usage in synthetic genes—written in the standard code or any orthogonal code—can be simply designed to maximize the number of codons subject to reassignment, and thereby maximize the functional orthogonality of synthetic genes.

### Example 5—Orthogonal Horizontal Gene Transfer

[0313] Next, building on orthogonal genetic code-decoder pairs, we created orthogonal horizontal gene transfer (O-HGT) systems composed of an orthogonal decoder and a mobile genetic element that uses an orthogonal genetic code. WT cells can transfer a WT mobile genetic element between themselves, but cannot transfer the WT mobile genetic element to cells containing orthogonal decoders. Cells containing O-HGT systems can transfer their mobile genetic element to cells that contain a compatible orthogonal decoder, but cannot transfer their mobile genetic element to cells containing an incompatible orthogonal decoder or to WT cells.

[0314] A mobile genetic element (F plasmid, F (WT)), which uses the canonical genetic code was transferred to WT cells (Syn61 WT), as expected. We also showed that F (WT) could not be transferred to Syn61Δ3 (tRNA_{CGA}^{Ala}, tRNA_{UGA}^{His}) cells, in which TCG codons are read as Ala and TCA codons are read as His (FIG. 4).

[0315] Next we investigated horizontal gene transfer for a mobile genetic element with an altered genetic code. We synthesized the mobile genetic element O-F1 (TCG-Ala, TCA-His). The genetic code in all annotated open reading frames of this F plasmid was compressed using the Syn61 scheme, and GCN codons (which encode alanine in the canonical code) and CAT/C codons (which encode histidine in the canonical code) were converted to TCG and TCA codons respectively within the trfA gene—this gene is essential for the replication of the mobile genetic element.

[0316] O-F1 (TCG-Ala, TCA-His) was horizontally transferred to Syn61Δ3 (tRNA_{CGA}^{Ala}, tRNA_{UGA}^{His}) cells. We further demonstrated that O-F1 (TCG-Ala, TCA-His) was not horizontally transferred to cells which read the canonical genetic code (FIG. 4). These experiments demonstrated that we can create O-HGT systems.

[0317] Next we created mutually orthogonal HGT systems, which are orthogonal to the natural genetic system and to each other. We created a new mobile genetic element O-F2 (TCG-His, TCA-Ala). The genetic code in all annotated open reading frames of this F plasmid was compressed using the Syn61 scheme and GCN codons (which encode alanine in the canonical code) and CAT/C codons (which encode histidine in the canonical code) were also converted to TCA and TCG codons respectively within the trfA gene.

[0318] We demonstrated that O-F2 (TCG-His, TCA-Ala) could be transferred to Syn61Δ3 (tRNA_{CGA}^{His}, tRNA_{UGA}^{Ala}) cells, in which TCG is decoded as His and TCA is decoded as Ala. In contrast O-F2 (TCG-His, TCA-Ala) was not transferred into Syn61 cells, which use the canonical genetic code to decode TCG and TCA codons as Ser. O-F2 (TCG-His, TCA-Ala) was not transferred to Syn61Δ3 (tRNA_{CGA}^{Ala}, tRNA_{UGA}^{His}) cells. Moreover, we demonstrated that neither a WT mobile genetic element (F (WT; TCG-Ser, TCA-Ser) nor O-F1 (TCG-Ala, TCA-His) were transferred into Syn61Δ3 (tRNA_{CGA}^{His}, tRNA_{IGA}^{Ala}) cells (FIG. 4). Further experiments demonstrating HGT systems are illustrated in FIG. 24. Overall, we demonstrated the scalability of our approach through the creation of five mutually orthogonal horizontal gene transfer systems.

[0319] These experiments demonstrated that we can create orthogonal and mutually orthogonal HGT systems.

### Example 6—Orthogonal Code-Locking Blocks Invading Codes

[0320] We hypothesized that replacing codons for specific natural amino acids in essential genes with TCA and TCG codons, and adding tRNAs that reassign these codons to the specific natural amino acids (FIG. 5), would obstruct the serT-mediated HGT we observed into Syn61Δ3 (FIG. 1).

[0321] Transfer of F (WT+serT) to Syn61Δ3 (tRNA_{CGA}^{Ala}, tRNA_{UGA}^{His}, O-SpecR(TCG-Ala, TCA-His)) was obstructed (10⁴ fold) in the absence of spectinomycin, as tRNA_{CGA}^{Ala} and tRNA_{UGA}^{His} compete with tRNA_{UGA}^{Ser} in the recipient cell to decrease the production of functional proteins from the mobile genetic element. However, this obstruction was not sufficient to completely ablate transfer of the mobile genetic element. Upon addition of spectinomycin—making O-SpecR(TCG-Ala, TCA-His) an essential gene in the cell—the decoding of TCG codons as alanine and the decoding of TCA codons as histidine become essential. Under these conditions transfer of the mobile genetic element was completely ablated (FIG. 5). Similar results were obtained with other refactored codes and other essential genes (FIG. 25, FIG. 26).

[0322] To extend our approach to viral infection, we identified pools of phage from the River Cam that can infect Syn61Δ3 (Methods). From these pools we isolated two individual phage (12 and 06 both T4-like phage), which carry an identical tRNA_{UGA}^{Ser} gene and infect Syn61Δ3 (FIG. 27); some viruses are known to carry their own tRNAs and other translation factors, to augment the cellular pool of translation factors and assist in the translation of codons within their own genes. As expected, expression of this tRNA in Syn61Δ3 is sufficient to confer susceptibility to infection by (otherwise non-infectious) T4 phage (FIG. 28). We demonstrated that, unlike Syn61Δ3, several refactored, code locked strains were completely resistant to infection with phage 6 and phage 12 (FIG. 5, FIG. 29).

[0323] Our results demonstrate that writing essential genes in an orthogonal code and reading these genes with a cognate orthogonal decoder creates cells that are locked into the orthogonal code. These cells that resist invasion by mobile genetic elements that use competing codes.

### Example 7—Genetic Code-Locking Enables Stable Phage Resistance in a Synthetic Organism

[0324] The experiments discussed in the preceding Examples, identify phage from nature that encode for a seryl-tRNA (tRNA^{Ser}_{UGA}) on their genome and showed that such phage can infect Syn61Δ3. These experiments also showed that we could ablate infection by these phage through code-locking (FIG. 34). However, we also show that, in contrast to conjugative transfer, reassignment is sufficient to ablate plaque formation. Further experiments were performed to determine why this the case.

[0325] We theorised that genomic differences may explain the phenotypic differences; one possible explanation is the number of TCG and TCA codons in the respective genomes. The genomes of the phage investigated here are considerably larger than F′ (WT+serT) and the total number of target codons is more than three times bigger (FIG. 30a). As more positions are affected by amino acid misincorporation, the chance that there is a deleterious effect is higher.

[0326] It could also be the genomic frequency of target codons. In comparison to F′ (WT+serT) the phage genomes show an about 25% increased frequency of target codons in their genome (FIG. 30b). With increased frequency of amino acid misincorporation the chance that an open reading frame is translated non-functionally is higher.

[0327] These two effects may add up. In the phage genomes there are not only more genes affected but these genes are on average affected to a larger degree. Therefore, we would expect codon reassignment to have a bigger impact on phage infection than on conjugative transfer. While it could in principle also be the relative usage of TCG and TCA codons in the genomes of phage 12, 6 and F′ (WT+serT), we think this is unlikely, because reassigning both these codons to leucine leads to the difference between phage infection and conjugative transfer.

[0328] It may be that mechanistic differences may explain phenotypic differences. The two modes of horizontal gene transfer, conjugative transfer and phage infection, are fundamentally different processes. For successful phage infection and plaque formation the whole life cycle of the phage needs to be completed. This includes attachment to the cell, injection of the viral genome, production of viral protein, phage genome replication, and maturation of phage particles (FIG. 30c). Only when mature phage particles are formed and successfully infect neighbouring cells can plaques be formed. Completion of the whole life cycle is a highly complex process that requires many parts to work together in tight temporal regulation. For T4-like phages, such as phage 12 and 6, multiple genes are essential for this process. A defect in one of these genes leads to ablation of plaque formation.

[0329] In contrast conjugative transfer and subsequent colony formation is a much simpler process. Following the attachment of a donor cell to a recipient, ssDNA is transferred to the recipient through a mating channel. In the recipient cell the DNA is then recircularised to form a stable dsDNA plasmid. Importantly, all proteins involved in this process are either expressed form the recipient cell genome or transferred from the donor alongside the DNA. Subsequently, solely the replication of the plasmid and its proper segregation during cell division needs to be ensured for successful colony formation (FIG. 30d). This process requires very few genes from the conjugative element to be functionally expressed.

[0330] Since more genes need to be functionally expressed from horizontally transferred DNA for the successful formation of plaques, it is expected that ambiguous decoding through codon reassignment is more detrimental for phage infection. If one essential gene is disrupted enough for its product not to be functional, the formation of plaques is ablated.

[0331] A further explanation is a dominant negative effect arising from ambiguous decoding of certain genes. Dominant negative effects are more likely for proteins that form complex interactions. Some mutations in viral envelope proteins are known to show dominant negative phenotypes. Mutation in a subunit of the envelope presumably interrupts oligomerisation and correct particle assembly. In T4-like phages the major capsid protein (gp23) forms hexamers that are the basis for particle assembly. In phages 06 and 12 there are three surface exposed serine residues that are encoded by TCA (FIG. 32). Amino acid misincorporation at one of these positions in a subset of gp23 could disrupt capsid assembly and thereby have a dominant negative effect on plaque formation.

[0332] We realized that an advantage of code locking might be in maintaining the alternative genetic code over time. The tRNAs responsible for code refactoring could be inactivated through a variety of mechanisms, such as mutation, deletion, or silencing. This would essentially revert the cell with a refactored genetic code back to codon compressed cell with decoder deletion (like Syn61Δ3) and render it susceptible to infection by phage that carry a suitable tRNA gene. If the code is locked however, the tRNAs responsible for refactoring are essential and cannot be inactivated. This ensures the temporal stability of the refactored code and with-it phage resistance.

[0333] We modelled the stability of alternative genetic codes in the presence and absence of code locking. tRNAs responsible for the alternative decoding of TCG and TCA codons were encoded on a low-copy plasmid bearing a hygromycin resistance. A second plasmid encoded for a variant of a spectinomycin resistance gene (SpecR); For cells without code locking: recSpec^{R} (ΔTCG, ΔTCA), for cells with code-locking: oSpec^{R} (TCG: Ala, TCA: His) and oSpec^{R} (TCG: Leu, TCA: Leu) respectively. Cells were serially passaged in the presence of spectinomycin and absence of hygromycin (no intrinsic pressure to maintain the plasmid). In each passage we measured the fraction of cells that maintained the plasmid encoding the tRNAs. We find that code locking stabilizes alternative codes and acts to maintain the code (FIG. 31a).

[0334] Consequently, code locked cells retain phage resistance over time, while non-locked cells lose resistance. We exposed cells with and without a locked code from the time course described above to phage 12 and 06. We observed that cells with a locked genetic code retain resistance to phage infection, while cells that lost the tRNAs responsible for code refactoring are susceptible to phage infection (FIG. 31b).

[0335] These experiments also show that a plasmid can be stably maintained by making it essential to the host based on the genetic code. E.g., due to the tRNAs on the plasmid and their necessity to decode an essential gene. This could find utility in avoiding antibiotic remittances in biotech applications.

### Example 8—Phage Propagation Assay

[0336] Cells from overnight cultures were diluted to an OD₆₀₀ ˜0.3 and inoculated with phage 12 (MOI=0.001). After 24 h incubation in a volume of 3 mL (2×ty) the phage titre was assessed by serial dilution (7.5 uL spots on a layer of top agar) and plaquing assays on a permissive strain (Syn61 WT). The control was empty media (2×ty) where no cells were present. The detection limit for this assay is at 1 plaque per 7.5 uL (133.3 PFU/mL).

[0337] The results are shown in FIG. 33 and show that phage 12 successfully replicates in Syn61WT and Syn61Δ3 cells but not in cells that have refactored and locked genetic codes (Syn61Δ3 (alaTCGA, hisRtga) and Syn61Δ3 (leuQcga, leuQtga)). Compared to the no cell control (ctrl.) phage propagation in code-locked cells yields lower phage titres. This is presumably the case because phage adsorbs to those cells but is unable to replicate. Experiments were performed in biological triplicates.

### Discussion

[0338] We have created 16 synthetic genetic codes; in each new code a subset of sense codons are reassigned to different amino acids than in the canonical code. Code reassignment refactors the structure of the genetic code, and directly alters the number, and types, of amino acids that can be accessed by point mutations (FIGS. S5, S6). Previous experimental work has shown that the choice of synonymous codons in individual genes and viruses can alter their robustness and evolvability (26-28), but such approaches are limited to exploring subsets of the canonical code. While a large body of theoretical work, and a limited number of in vitro experiments, have considered the relationship between the structure of the genetic code and its robustness and evolvability (19, 20) it has been impossible to investigate the resulting hypotheses through experiments in living cells. Refactoring the structure of the genetic code provides new opportunities to experimentally test how altered codes affect the robustness and evolvability of protein and cellular function. In future work we aim to leverage genetic code refactoring to accelerate directed evolution.

[0339] We have experimentally exemplified the creation of semantic orthogonality between organisms that use distinct reassigned codes. We have explicitly shown that semantic orthogonality creates functional orthogonality for the genes tested; mis-matches between the genetic codes used to write a gene and the decoders used to read the gene leads to mis-synthesized proteins which are non-functional.

[0340] We have created multiple mutually orthogonal HGT systems, in which genes can only be correctly read by, and transferred to, cells with cognate decoders. Each type of cell, with a distinct code-decoder system, implements a distinct, refactored, genetic code. These systems may enable experimental investigations into the role of HGT in fixing a universal genetic code, through competition between pools of genotypes written in different codes (4).

[0341] Shielding synthetic organisms from environmental genetic elements can be valuable for biotechnological applications on an industrial scale, where contamination with mobile genetic element, including viruses, can cause financial losses and disrupt vital supply chains (29). Resistance to the horizontal transfer of natural genes, into organisms with genomic code compression and tRNA deletion, can be bypassed by re-acquiring the deleted tRNAs, and by mobile genetic elements that carry these tRNAs. Indeed mobile genetic elements—including viruses—carry their own tRNAs and other translation factors, which augment the cellular pool of translation factors and assist in the translation of codons within their own genes (9, 30, 31).

[0342] Synthetic organisms with essential genes written in an orthogonal genetic code, and decoders that correctly read the orthogonal code, confer complete resistance to the transfer of mobile genetic elements written in the canonical code, even when the mobile genetic elements contain tRNAs that would allow the cell to correctly read the canonical code. This defines a paradigm for creating organisms that actively resist invasion by foreign codes.

[0343] New strategies that limit the transfer of genetic information from synthetic organisms to natural organisms may form the basis of genetic firewalls that isolate synthetic genetic systems from the environment. This is an important challenge, that complements the challenge of controlling the survival and growth of synthetic organisms for biocontainment, especially when considering the use of engineered organisms outside the laboratory (32). All compressed genetic codes are subsets of the natural code and are correctly read by the decoders of the full code; genetic systems written in a compressed genetic code are correctly read by natural organisms. Therefore, compressed genetic codes cannot be used to genetically isolate synthetic organisms from natural organisms. The ability to refactor the structure of the genetic code and write genes that are read correctly in synthetic organisms, but read incorrectly in natural organisms, provides the basis of a powerful strategy to obstruct the transfer of genetic information from synthetic organisms to natural organisms. Importantly, this strategy is globally applicable to any gene or genetic system added to the synthetic organism. As the genetic code is near universally conserved we anticipate that the principles we have established may be applied to a broad range of other organisms.

### REFERENCES AND NOTES

[0344] 1. F. H. Crick, L. Barnett, S. Brenner, R. J. Watts-Tobin, General nature of the genetic code for proteins. Nature 192, 1227-1232 (1961).
[0345] 2. M. W. Nirenberg, J. H. Matthaei, The dependence of cell-free protein synthesis in E. coli upon naturally occurring or synthetic polyribonucleotides. Proc Natl Acad Sci USA 47, 1588-1602 (1961).
[0346] 3. R. J. Hall, F. J. Whelan, J. O. McInerney, Y. Ou, M. R. Domingo-Sananes, Horizontal Gene Transfer as a Source of Conflict and Cooperation in Prokaryotes. Front Microbiol 11, 1569 (2020).
[0347] 4. K. Vetsigian, C. Woese, N. Goldenfeld, Collective evolution and the genetic code. Proc Natl Acad Sci USA 103, 10696-10701 (2006).
[0348] 5. D. de la Torre, J. W. Chin, Reprogramming the genetic code. Nat Rev Genet 22, 169-184 (2021).
[0349] 6. E. V. Koonin, A. S. Novozhilov, Origin and evolution of the genetic code: the universal enigma. IUBMB Life 61, 99-111 (2009).
[0350] 7. M. Kollmar, S. Muhlhausen, Nuclear codon reassignments in the genomics era and mechanisms behind their evolution. Bioessays 39, (2017).
[0351] 8. J. Ling et al., Natural reassignment of CUU and CUA sense codons to alanine in Ashbya mitochondria. Nucleic Acids Res 42, 499-508 (2014).
[0352] 9. A. L. Borges et al., Widespread stop-codon recoding in bacteriophages may regulate translation of lytic genes. Nat Microbiol 7, 918-927 (2022).
[0353] 10. M. A. Santos, A. C. Gomes, M. C. Santos, L. C. Carreto, G. R. Moura, The genetic code of the fungal CTG clade. C R Biol 334, 607-611 (2011).
[0354] 11. D. J. Taylor, M. J. Ballinger, S. M. Bowman, J. A. Bruenn, Virus-host co-evolution under a modified nuclear genetic code. PeerJ 1, e50 (2013).
[0355] 12. Y. Shulgina, S. R. Eddy, A computational screen for alternative genetic codes in over 250,000 genomes. Elife 10, (2021).
[0356] 13. D. G. Gibson et al., Complete chemical synthesis, assembly, and cloning of a Mycoplasma genitalium genome. Science 319, 1215-1220 (2008).
[0357] 14. D. G. Gibson et al., One-step assembly in yeast of 25 overlapping DNA fragments to form a complete synthetic Mycoplasma genitalium genome. Proc Natl Acad Sci USA 105, 20404-20409 (2008).
[0358] 15. J. Fredens et al., Total synthesis of Escherichia coli with a recoded genome. Nature 569, 514-+(2019).
[0359] 16. F. J. Isaacs et al., Precise manipulation of chromosomes in vivo enables genome-wide codon replacement. Science 333, 348-353 (2011).
[0360] 17. M. J. Lajoie et al., Genomically recoded organisms expand biological functions. Science 342, 357-360 (2013).
[0361] 18. W. E. Robertson et al., Sense codon reassignment enables viral resistance and encoded polymer synthesis. Science 372, 1057-1062 (2021).
[0362] 19. G. Pines, J. D. Winkler, A. Pines, R. T. Gill, Refactoring the Genetic Code for Increased Evolvability. mBio 8, (2017).
[0363] 20. J. Calles, I. Justice, D. Brinkley, A. Garcia, D. Endy, Fail-safe genetic codes designed to intrinsically contain engineered organisms. Nucleic Acids Res 47, 10439-10451 (2019).
[0364] 21. M. Schmidt, V. Kubyshkin, How To Quantify a Genetic Firewall?A Polarity-Based Metric for Genetic Code Engineering. Chembiochem 22, 1268-1284 (2021).
[0365] 22. D. S. Marks, S. W. Michnick, Democratizing the mapping of gene mutations to protein biophysics. Nature 604, 47-48 (2022).
[0366] 23. S. Teng, A. K. Srivastava, C. E. Schwartz, E. Alexov, L. Wang, Structural assessment of the effects of amino acid substitutions on protein stability and protein protein interaction. Int J Comput Biol Drug Des 3, 334-349 (2010).
[0367] 24. V. Parthiban, M. M. Gromiha, D. Schomburg, CUPSAT: prediction of protein stability upon point mutations. Nucleic Acids Res 34, W239-242 (2006).
[0368] 25. P. C. Ng, S. Henikoff, Predicting the effects of amino acid substitutions on protein function. Annu Rev Genomics Hum Genet 7, 61-80 (2006).
[0369] 26. B. A. Renda, M. J. Hammerling, J. E. Barrick, Engineering reduced evolutionary potential for synthetic biology. Mol Biosyst 10, 1668-1678 (2014).
[0370] 27. G. Moratorio et al., Attenuation of RNA viruses by redirecting their evolution in sequence space. Nat Microbiol 2, 17088 (2017).
[0371] 28. J. R. Coleman et al., Virus attenuation by genome-scale changes in codon pair bias. Science 320, 1784-1787 (2008).
[0372] 29. P. W. Barone et al., Viral contamination in biologic manufacture and implications for emerging therapies. Nat Biotechnol 38, 563-572 (2020).
[0373] 30. P. Alamos et al., Functionality of tRNAs encoded in a mobile genetic element from an acidophilic bacterium. RNA Biol 15, 518-527 (2018).
[0374] 31. T. Tuller et al., Association between translation efficiency and horizontal gene transfer within microbial communities. Nucleic Acids Res 39, 4743-4755 (2011).
[0375] 32. J. W. Lee, C. T. Y. Chan, S. Slomovic, J. J. Collins, Next-generation biocontainment systems for engineered organisms. Nat Chem Biol 14, 530-537 (2018).

### Materials and Methods

### Strains

[0376] Throughout the text Syn61 WT refers to Syn61(ev2) (18) and Syn61Δ3 refers to Syn61Δ3(ev4) (18).

### Gene Recoding

[0377] For all genes and plasmids used in experiments in Syn61Δ3 derived cells it was necessary to compress the genetic code according to the recoding rules of Syn61 (TCG and TCA codons were replaced with AGC and AGT respectively, and the TAG stop codon was replaced with TAA). We recoded open reading frames as previously described for Syn61(15). The plasmids used in this study are provided in Data File S2 of Zurcher et al. “Refactored genetic codes enable bidirectional genetic isolation”, Science, provided herein as Table 1.

Construction of tRNA Plasmids for Decoding TCG and TCA Codons in Syn61Δ3

[0378] To incorporate amino acids in response to TCG and TCA codons we used pSC101-Kan and pSC101-Hyg plasmids (conferring resistance to kanamycin and hygromycin respectively) into which we cloned genes encoding the relevant tRNA or tRNAs. No exogenous aaRS was used, since all tRNAs used in this study are acylated by an endogenous E. coli aaRS. For tRNAs that incorporate amino acids other than serine in response to TCG and TCA codons, we designed genes in which the anticodon of the relevant isoacceptor tRNA was replaced with CGA and UGA respectively.

[0379] We constructed pSC101-based tRNA plasmids using HiFi Assembly of multiple fragments. Two different architectures of tRNA plasmids were used i) tRNAs were expressed under lpp promoter and the pSC101 backbone included a pheS-HygR double selection cassette expressed under an EM7 promoter, and ii) tRNAs were expressed using the native expression context of serT in the genome of E. coli and the pSC101 backbone included a kan^{R} expressed under a T3 promoter. In cases where two tRNAs were expressed from one plasmid they were expressed as an operon using the intergenic region between alaX and alaW tRNA genes in the E. coli genome. Backbone fragments were generated via PCR. tRNAs and tRNA operons were ordered as oligos (Merck) or gBlocks (IDT). All cloning was conducted in Syn61Δ3.

### Construction of Recoded Antibiotic Plasmids for Assessment of Genetic Code Orthogonality

[0380] To assess the functionality of antibiotic genes encoded according to different genetic codes we used pMB1-based plasmids containing a codon compressed antibiotic resistance gene into which we cloned genes encoding Hygromycin or Spectinomycin resistance (Data File S2). We constructed pMB1-based tRNA plasmids using HiFi Assembly of multiple fragments. Backbone fragments were generated via PCR. Recoded spectinomycin and hygromycin resistance genes were ordered as gBlocks (IDT).

### Construction of Recoded Mobile Genetic Elements

[0381] The intermediate, F (ΔTCG, TCA, TAG), was constructed from synthetic DNA (TWIST Bioscience) via yeast assembly (33). F (ΔTCG, TCA, TAG) was designed by recoding all annotated open reading frames in the RK2 conjugative plasmid, as previously described (15). The recoding of trfA to generate O-F1 (TCG-Ala, TCA-His) and O-F2 (TCG-His, TCA-Ala) was performed by lambda red recombination (34). Recoded versions of trfA were synthesized as gBlocks (IDT). All modifications were conducted in E. coli Dh10B. To enable the replication of F plasmids that were either lacking the trfA gene or encoding trfA in a genetic code not decodable by Dh10B, a pMB1 based helper plasmid expressing WT trfA in its endogenous context in the RK2 conjugative plasmid was used. This plasmid contained an amp^{R} gene expressed under the amp^{R} promoter and was assembled by HiFi Assembly from fragments generated by PCR.

sfGFP Expression Measurements

[0382] We expressed sfGFP-His6 genes bearing a single TCG or TCA codon at position 3 in Syn61Δ3 cells harboring a plasmid encoding a tRNA or tRNA operon. We electroporated 50 μL of Syn61Δ3 cells with pBAD_sfGFP reporter plasmid (100 ng) and recovered the cells in 1 mL of SOB for 90 min while shaking at 1050 rpm at 37° C. Subsequently, we inoculated the recovery culture (1 mL) into 5 mL of prewarmed 2×YT media containing 50 μg/mL apramycin and incubated cells overnight at 37° C. while shaking at 220 rpm before preparing electrocompetent cells. We electroporated pSC101-based tRNA plasmids (100 ng) into Syn61Δ3 cells with pBAD_sfGFP and recovered the cells in deep well 96-well plates for 90 min in 500 μL SOB. Subsequently, we inoculated a tenth of the recovery culture (50 μL) in 450 μL of prewarmed 2×YT media supplemented with 200 μg/mL hygromycin and 50 μg/mL apramycin. After recovering for 36 h, 37° C., 750 rpm, we setup expressions in 96-well microtiter plate format, inoculating overnight cultures 1:50 into 500 μL of prewarmed 2×YT containing hygromycin (200 ng/μL), apramycin (50 ng/μL), and L-arabinose (0.2%). The expressions were incubated for 16 h at 37° C. while shaking at 750 rpm. Plates were centrifuged at 3200 g for 10 min. We resuspended cell pellets in 150 μL of PBS, 100 μL of which we transferred into a Costar clear 96-well flat-bottom plate. In this plate we recorded OD₆₀₀ and GFP fluorescence (μₑₓ: 485 nm; λₑₘ: 520 nm) measurements on a PHERAstar FS plate reader (BMG LABTECH) (gain setting of 0, focal adjustment of 00 mm).

[0383] To determine the protein yield sfGFP (WT) was expressed in Syn61Δ3 (16 h at 37° C. in 5 mL of 2×TY+0.2% arabinose) and purified as described below (three elutions 100 μL each). Protein concentration post-purification was determined by nanodrop (elution 1: 0.77 mg/mL; elution 2: 0.09 mg/mL; elution 3: −0.0 mg/mL). The measured amount adds up to 0.086 mg of protein extracted from 5 mL of culture, which corresponds to a protein yield of −17 mg/L of culture.

Purification of sfGFP-His6x and Ubiquitin-His6x Proteins

[0384] Syn61Δ3 cells harbouring a pSC101-based tRNA plasmid and a pBAD_sfGFP (or Ubiquitin) plasmid were grown for 16 h in 5 mL (20 mL for Ubiquitin) 2×YT media containing 200 μg/mL hygromycin, 50 μg/mL apramycin, and 0.2% L-arabinose at 37° C. while shaking at 220 rpm. Following the expression, cells were centrifuged, resuspended in 1 mL Lysis buffer (1× Bugbuster Protein Extraction Reagent (Novagen), 1×PBS, 50 μg/mL DNase 1, 20 mM imidazole, and 100 μg/mL lysozyme), and incubated at 4° C. for 1 h. The resulting lysates were centrifuged (16000×g) at 4° C. for 30 min. The supernatant was then transferred to 1.5 mL microcentrifuge tubes containing 50 μL of Ni²⁺-NTA slurry (Qiagen) and incubated for 1 h at 4° C. while tumbling. Ni2+-NTA beads were collected by gravity filtration on a fritted column and washed three times in 500 μL wash buffer (1×PBS, 40 mM imidazole). Lastly, proteins were eluted in 100 μL of elution buffer (1×PBS, 300 mM imidazole, pH 8) and collected in a fresh microcentrifuge tube via centrifugation (100×g, 4° C., 1 min).

### Intact Protein Mass Spectrometry

[0385] ESI-MS analysis of proteins (Ubiquitin FIG. 13 and sfGFP FIG. 8) was performed using a Waters Xevo G2 mass spectrometer coupled to a modified nanoAcquity LC system. The purified samples (as described above) were separated on a BEH C4 UPLC column (1.7 μm; 1.0×100 mm; Waters) over 20 min with a flowrate of 50 UL/min and a water/acetonitrile gradient from 2% vol/vol to 80% vol/vol. Subsequently, eluted samples were interfaced via Zspray electrospray ionization source with the mass spectrometer (Waters). Data were acquired in positive ion mode with a range from 300-2000 m/z and an applied cone voltage of 30 V. Spectra were deconvoluted using the MaxEnt1 function within MassLynx software (Waters). To calculate the expected molecular weights, the expected mass of wild-type proteins was determined using GPMAW (Lighthouse Data) and then manually edited to accommodate encoded amino acid changes.

[0386] ESI-MS analysis of proteins (sfGFP FIG. 2B, FIG. 14, FIG. 15) was performed using a Waters Vion IMS Qtof mass spectrometer coupled to a modified nanoAcquity LC system. The purified samples (as described above) were separated on an Acuity UPLC protein BEH C4 column (1.7 um; 2.1×50 mm; Waters) over 7 min with a flowrate of 200 UL/min and a water/acetonitrile gradient from 5% vol/vol to 100% vol/vol. Subsequently, eluted samples were interfaced via Zspray electrospray ionization source with the mass spectrometer (Waters). Data were acquired in positive ion mode with a range from 100-2000 m/z. Spectra were deconvoluted using the MaxEnt1 function within Unifi software (Waters). To calculate the expected molecular weights, the expected mass of wild-type proteins was determined using GPMAW (Lighthouse Data) and then manually edited to accommodate encoded amino acid changes.

[0387] Mass spectra of ubiquitin in the screen of anticodon modified tRNAs (FIG. 18) were acquired on an Agilent 1200 LC-MS system equipped with a 6130 Quadrupole spectrometer. Proteins were eluted from a Phenomenex Jupiter C4 column (150×2 mm, 5 μm). Reverse-phase HPLC was performed using Buffer A (0.2% formic acid in water) and buffer B (0.2% formic acid in acetonitrile (MeCN)). Mass spectra were acquired in positive mode and analyzed with MS Chemstation software (Agilent Technologies). The deconvolution program provided in the software was used to obtain the entire mass spectra.

### Calculating Signal to Noise and Fidelity Measurements in ESI-MS Spectra

[0388] For ESI-spectra of sfGFP, we calculated the average signal intensity, and standard deviation of intensities, between 20,000 Da and 27,000 Da. We defined the noise as the average signal intensity plus twice the standard deviation for this mass window. The limit of fidelity measurement was calculated as: (1−(N/S))×100. (Note: for the spectra in FIG. S3 the baseline signal was determined between 20,000 Da and 26,500 Da because there is a peak from a degradation product around 27,000 Da). This calculation defines the maximum fidelity that can be obtained from the spectra, we note that the true biological fidelity may be higher.

[0389] To determine the specificity for decoding TCG codons in the presence of both tRNA_{CGA}^{XXX} and tRNA_{UGA}^{YYY}, where XXX and YYY are distinct amino acids, we divided the intensity of the signal at the peak resulting from incorporation of XXX at TCG by the intensity of the signal at the expected mass for incorporating YYY at TCG. The intensity at the expected mass for incorporating YYY at TCG was determined as the maximum signal in a 2 Da window around the theoretical calculated mass.

[0390] To determine the specificity for decoding TCA codons in the presence of both tRNA_{CGA}^{XXX} and tRNA_{UGA}^{YYY}, where XXX and YYY are distinct amino acids, we divided the intensity of the signal at the peak resulting from incorporation of YYY at TCA by the intensity of the signal at the expected mass for incorporating XXX at TCA. The intensity at the expected mass for incorporating XXX at TCA was determined as the maximum signal in a 2 Da window around the theoretical calculated mass.

Western Blotting of Cell Lysates from Experiments of Ubiquitin Expression

[0391] Syn61Δ3 cells harboring a pSC101-based tRNA plasmid and a pBAD_Ubiquitin plasmid were grown for 16 h in 20 mL of 2×TY media containing 200 μg/mL hygromycin, 50 μg/mL apramycin, and 0.2% L-arabinose at 37° C. while shaking at 220 rpm. Cultures were normalized to OD600=1.0. 500 μL of normalized culture were lysed with sample buffer (Nupage Buffer, 10% beta mercaptoethanol, PMSF) and vortexed intensively to shear DNA. Samples were separated by SDS-PAGE (NuPAGE 4-12% in MES buffer and transferred to polyvinylidene difluoride (PVDF) membrane by iBlot 2 dry blotting system (Thermo Fisher Scientific). Membrane was blocked by Odyssey blocking buffer in PBS (catalogue (cat.) no. 927-40000, Li-Cor) at room temperature for 30 min. Membrane was incubated with anti-His-tag primary antibody (Abcam, cat. no. ab18184) in primary antibody solution (dilution 1:1000 in Odyssey T20 (PBS) antibody diluent (927-75001, Li-Cor)) at 4° C. overnight. All incubations were carried out on a platform shaker. The membrane was washed three time with PBST (PBS supplemented with 0.1% Tween-20 (v/v)), and incubated with the secondary antibody Goat anti-Mouse IRDye 680RD 925-68070 (1:15,000 (v/v) in PBS blocking buffer supplemented with 0.2% Tween-20 (v/v), and 0.01% SDS) at room temperature for 1 h. After washing 3 times with PBST and once with PBS, the immunoreactive proteins were visualized on a Typhoon Trio phosphorimager (GE Life Sciences). Samples analysed by Western blotting were also separated by SDS-PAGE and the gel was stained with InstantBlue (Expedeon) for 30 min followed by a rinse with water.

### MS/MS of Ubiquitin Variants

[0392] Solutions samples were reduced with dithiothreitol at 37° C. and alkylated with chloroacetamide in the dark at room temperature. Samples were digested with LysC (Promega) at 37° C. for 4 h followed by trypsin (Promega) digestion over night at 37° C. The peptide mixtures were acidified and desalted using home-made C18 (3M Empore) stage tips that contained 3 μl of Poros Oligo R3 (Thermo Fisher Scientific) resin. Bound peptides were eluted from stage tip with 30-80% acetonitrile (MeCN) and partially dried down in a Speed Vac (Savant).

[0393] Peptides were separated on an Ultimate 3000 RSLC nano System (Thermo Scientific), fitted with a 75 μm×25 cm, nanoEase C18 T3 column (Waters), using mobile phases buffer A (2% MeCN, 0.1% formic acid) and buffer B (80% MeCN, 0.1% formic acid). Eluted peptides were introduced directly via a nanospray ion source into a Q Exactive Plus hybrid quardrupole-Orbitrap mass spectrometer (Thermo Fisher Scientific). The mass spectrometer was operated in data dependent mode. MS1 spectra were acquired from 380-1600 m/z, at a resolution of 70000, followed by MS2 acquisitions of the 15 most intense ions with a resolution of 17500 and NCE of 27%. MS target values of 1e6 and MS2 target values of 1e5 were used. Dynamic exclusion was set for 30 s.

[0394] The acquired raw data files were searched against E. coli UniProt Fasta database (downloaded September 2022), with an additional 20 ubiquitin sequences (each sequence had a different canonical amino acid at position 11), using MaxQuant with the integrated Andromeda search engine (v.1.6.17.0). Carbamidomethylation of cysteine was set as fixed modification while oxidation of methionine as variable modifications. Enzyme specificity was set to trypsin/p and a maximum two missed cleavages were allowed.

### Preparation of Electrocompetent Syn61Δ3 Cells and Electroporation

[0395] 250 mL of prewarmed 2×YT medium were inoculated with 5 mL of Syn61Δ3 overnight culture and grown at 37° C. while shaking (220 rpm) to an OD₆₀₀ of ˜0.5. The cells were chilled on ice for 10 min and harvested by centrifugation (4000 rpm, 10 min, 4° C.). After washing cell pellets three times in 50 mL of ice-cold 20% glycerol they were resuspended in a final volume of 500 μL of ice-cold 20% glycerol and frozen in liquid nitrogen in aliquots of 100 μL. For electroporation frozen cells were thawed on ice and 50 μL of cells were mixed with 100 ng of plasmid DNA. The mixture was placed in an electroporation cuvette (2 mm gap; SLS scientific) and electroporated using an Eppendorf e-porator (2500 V). Cells were immediately resuspended in 1 mL of prewarmed SOB outgrowth media, transferred into a 2 mL microcentrifuge tube, and incubated at 37° C. for 90 min while shaking (1050 rpm). Subsequently, we inoculated the recovery culture (1 mL) into 5 mL of prewarmed 2×YT media containing appropriate antibiotics and incubated cells overnight at 37° C. while shaking at 220 rpm.

### Conjugation Assay

[0396] Donor and recipient cells for conjugation assays were grown overnight in 5 mL 2×YT in the presence of appropriate antibiotics (50 μg/mL kanamycin for recipients; 20 μg/mL chloramphenicol for donors). The OD₆₀₀ of cultures was determined and cultures were normalized to OD₆₀₀=2.0. 400 μL of culture were then transferred to a 2 mL microcentrifuge tube and washed twice with 2×YT. After washing pellets were resuspended in a final volume on 200 μL. For conjugations 100 μL of donor and 100 μL of recipient were mixed and spotted in 5 μL drops on a TYE plate. The plate was then incubated at 37° C. for 2 h. Subsequently, cells were washed from the plate using 2 mL 2×YT and transferred to a fresh 2 mL microcentrifuge tube. Cells were pelleted by centrifugation (1 min, 3000×g), resuspended in 1 mL H₂O, and diluted in series (1:10). Dilutions ranging 10⁰-10⁻⁷ were spotted (3 μL drops) on a 2×YT Agar plate containing 50 μg/mL kanamycin and 20 μg/mL chloramphenicol. Plates were incubated 24 to 36 h at 37° C. and colonies were counted manually to determine the number of successful transconjugants. For experiments with code-locking the appropriate antibiotic (200 μg/mL hygromycin or 75 μg/mL spectinomycin) was added to the 2×TY agar plates.

### Doubling Time Measurements

[0397] Cells were inoculated in a Costar clear 96-well flat-bottom plate from dense overnight culture (1:100 ratio) in 200 μL 2×TY containing 200 μg/mL hygromycin. Cells were grown at 37° C. shaking (880 rpm) in a TECAN infinite M200 Pro. Every 5 min, over a 24 h period, we took an OD₆₀₀ measurement to determine cell density. A sliding window of 10 time points was used to determine the area with the steepest slope of the growth curve. Doubling times were determined from this area.

Phage Enrichments from Environmental Samples

[0398] Water samples were collected from different locations alongside the River Cam (Cambridge, United Kingdom). After filtration through a 0.22 μm filter, 4 mL of a water sample was mixed with 4 mL of 2×LB and 200 μl of an overnight culture of E. coli, followed by a 48 h incubation at 37° C. in a rotary wheel. Then, cultures were centrifuged at 4500×g for 15 mins and the filtered supernatant was kept as a phage enrichment.

### Note: Locations

[0399] A: Cambridge Water Treatment plant outflow (52°13′55.3″N 0°10′15.3″E); B: Grassy Corner (52°13′21.3″N 0°10′00.0″E); C: Coffee Temple (52°13′07.7″N 0°09′01.5″E); D: Green Dragon Bridge (52°13′02.9″N 0°08′44.8″E); D: Jesus Green's Lock (52°12′45.8″N 0°07′15.4″E); E: Scudamore's at Granta Place (52°12′04.6″N 0°06′56.8″E).

### Plaque Purification and Phage Lysate Preparation

[0400] To purify phages plaques, phage enrichments were serially diluted (10-fold) in LB and 10 μl of each dilution was added to a bijoux bottle with 200 μL of an overnight culture of the bacterial host to assess. Then 4 mL of molten top agar (0.35% agarose) was added, mixed, and poured as an overlay on LB agar plates containing the appropriate antibiotics. The resulting plates were incubated at 37° C. overnight. We picked Individual phage plaques using a sterile toothpick and resuspended them in 100 μl of LB. The mixture was spun down and the supernatant was diluted and used for further purification rounds as described above. This process was repeated three times to ensure phage purity.

[0401] Phage lysates were collected from bacterial lawns exhibiting near-confluent lysis after infection by pure phage isolates. Top agar was scraped into a glass universal bottle containing 3 ml of LB and homogenized using a sterile pipette. The suspension was then centrifuged (4500×g, 4° C., 20 min). The obtained supernatants were filtered through a 0.22 μm filter and stored in bijoux bottles at 4° C. Phage titer was estimated by counting the number of plaques obtained from phage lysate dilutions, plated out, as described above.

### Phage DNA Extraction

[0402] Genomic DNA of phages was obtained from 450 μL of high-titer phage lysates (˜10¹⁰ PFU/mL) using a standard phenol/chloroform method as described by Chen et al. (2017) (43).

### Efficiency of Plaquing Assays

[0403] Phage lysates were serially diluted (10-fold) in LB. Dilutions were spotted (7.5 μL per spot) on freshly poured and dried top lawns (200 μL of overnight culture mixed with 4 mL of top agar poured as an overlay on LB agar plates containing 200 μg/mL hygromycin and 75 μg/mL spectinomycin) and incubated overnight at 37° C. Images of spots were taken on an iPhone 8 and converted to gray scale in Adobe illustrator. For concentrations where single plaques were expected full top lawns were poured to get a better assessment of plaque forming units at the given concentration (200 μL of overnight culture mixed with 10 μL of phage lysate at the concentration of interest and 4 mL of top agar poured as an overlay on LB agar plates containing 200 μg/mL hygromycin and 75 μg/mL spectinomycin). All plaque counts displayed in bar graphs stem from full top lawns. For titer lysates (>10⁶ PFU/mL) full top lawns were poured as described above to avoid lysis from without. The maximum titers used for infections with phage 06 and phage 12 were ˜7.5×10⁹ PFU/mL and ˜1.1×10¹⁰ PFU/mL respectively. The strains used in this experiment contain different versions of spectinomycin resistance genes. Syn61 WT contains a SpecR WT, Syn61Δ3 contains recSpecR, Syn61Δ3 (tRNA_{CGA}^{Ala}, tRNA_{UGA}^{His}) contains O-SpecR (TCG-Ala, TCA-His), Syn61Δ3 (tRNA_{CGA}^{Ala}, tRNA_{UGA}^{Leu}) contains O-SpecR (TCG-Ala, TCA-Leu), Syn61Δ3 (tRNA_{CGA}^{Leu}, tRNA_{UGA}^{Leu}) contains O-SpecR (TCG-Leu, TCA-Leu), Syn61Δ3 (tRNA_{CGA}^{Pro}, tRNA_{UGA}^{Leu}) contains O-SpecR (TCG-Pro, TCA-Leu).

### Electron Microscopy

[0404] Phage samples were prepared by adsorbing 10 μL of a high titer phage lysate (>10⁹ PFU/mL) onto a charged copper grid and stained with 2% (w/v) uranyl acetate. Transmission Electron Micrograph (TEM) images were taken at the Cambridge Advanced Imaging Centre (CAIC), University of Cambridge using a FEI Tecnai G2 series transmission electron microscope (Accelerating voltage: 200.0 kV; Direct magnification: 50,000×).

### Phage Genome Sequencing and De Novo Assembly

[0405] Purified phage DNA was prepared for NGS using the Nextera XT DNA library preparation kit. Libraries were paired-end sequenced on a MiSeq (Illumina, reagent kit v3 (150 cycles)). De novo assembly of phage genomes was performed with Unicycler in short-read mode and with default options. Sequence coverage throughout the phage genome is represented as median sequencing coverage in windows of 250 bp.

tRNA Screen

[0406] An overview of the sequences used in the tRNA screen are provided in SEQ ID NOs: 7-68. These sequences represent, in order, ArgX (anticodon modified to CGA), ArgX (anticodon modified to TGA), ArgW (anticodon modified to CGA), ArgW (anticodon modified to TGA), ileT (anticodon modified to CGA), ileT (anticodon modified to TGA), PheU (anticodon modified to CGA), PheU (anticodon modified to TGA), AspT (anticodon modified to CGA), AspT (anticodon modified to TGA), AsnT (anticodon modified to CGA), AsnT (anticodon modified to TGA), GltU (anticodon modified to CGA), GltU (anticodon modified to TGA), ValV (anticodon modified to CGA), ValV (anticodon modified to TGA), ThrT (anticodon modified to CGA), ThrT (anticodon modified to TGA), ThrU (anticodon modified to CGA), ThrU (anticodon modified to TGA), GlyU (anticodon modified to CGA), GlyU (anticodon modified to TGA), GlyT (anticodon modified to CGA), GlyT (anticodon modified to TGA), GlnU (anticodon modified to CGA), GlnU (anticodon modified to TGA), GlnV (anticodon modified to CGA), GlnV (anticodon modified to TGA), MetV (anticodon modified to CGA), MetV (anticodon modified to TGA), MetY (anticodon modified to CGA), MetY (anticodon modified to TGA), ThrV (anticodon modified to CGA), ThrV (anticodon modified to TGA), valW (anticodon modified to CGA), valW (anticodon modified to TGA), ArgQ (anticodon modified to CGA), ArgQ (anticodon modified to TGA), ArgV (anticodon modified to CGA), ArgV (anticodon modified to TGA), CysT (anticodon modified to CGA), CysT (anticodon modified to TGA), HisR (anticodon modified to CGA), HisR (anticodon modified to TGA), ileX (anticodon modified to CGA), ileX (anticodon modified to TGA), LysQ (anticodon modified to CGA), LysQ (anticodon modified to TGA), ProK (anticodon modified to CGA), ProK (anticodon modified to TGA), ProL (anticodon modified to CGA), ProL (anticodon modified to TGA), ProM (anticodon modified to CGA), ProM (anticodon modified to TGA), TrpT (anticodon modified to CGA), TrpT (anticodon modified to TGA), TyrV (anticodon modified to CGA), TyrV (anticodon modified to TGA), AlaT (anticodon modified to CGA), AlaT (anticodon modified to TGA), LeuQ (anticodon modified to CGA), LeuQ (anticodon modified to TGA).

TABLE 1

| Plasmid | Description | Genbank # | Reference |
|---|---|---|---|
| Helper | Contains lambda-red recombination components and | MN927219 | Wang et al. |
| | Cas9 under arabinose inducible promoter as well as | | |
| | tracrRNA | | |
| pBAD_sfGFP3TCG | Recoded sfGFP reporter (as in Genbank accession | none | Robertson e |
| | MW879733, without the aaRS/tRNA pair) with TCG | | |
| | inserted immediately after codon 2 of sfGFP | | |
| pBAD_sfGFP3TCA | Recoded sfGFP reporter (as in Genbank accession | none | Robertson e |
| | MW879733, without the aaRS/tRNA pair) with TCA | | |
| | inserted immediately after codon 2 of sfGFP | | |
| | | none | This study |
| pSC101_HygR_alaT_CGA | Recoded pheS-HygRdoubleselectioncassette alaT tRNA | none | This study |
| | with CGA chimeric anticodon under lpp promoter | | |
| pSC101_HygR_alaT_TGA | Recoded pheS-HygRdoubleselectioncassette alaT tRNA | none | This study |
| | with TGA chimeric anticodon under lpp promoter | | |
| pSC101_HygR_hisR_CGA | Recoded pheS-HygRdoubleselectioncassette hisR tRNA | none | This study |
| | with CGA chimeric anticodon under lpp promoter | | |
| pSC101_HygR_hisR_TGA | Recoded pheS-HygRdoubleselectioncassette hisR tRNA | none | This study |
| | with TGA chimeric anticodon under lpp promoter | | |
| pSC101_HygR_leuQ_CGA | Recoded pheS-HygRdoubleselectioncassette leuQ tRNA | none | This study |
| | with CGA chimeric anticodon under lpp promoter | | |
| pSC101_HygR_leuQ_TGA | Recoded pheS-HygRdoubleselectioncassette leuQ tRNA | none | This study |
| | with TGA chimeric anticodon under lpp promoter | | |
| pSC101_HygR_proM_CGA | Recoded pheS-HygRdoubleselectioncassette proM tRNA | none | This study |
| | with CGA chimeric anticodon under lpp promoter | | |
| pSC101_HygR_proM_TGA | Recoded pheS-HygRdoubleselectioncassette proM tRNA | none | This study |
| | with TGA chimeric anticodon under lpp promoter | | |
| pSC101_HygR_serT | Recoded pheS-HygRdoubleselectioncassette serT tRNA | none | This study |
| | under lpp promoter | | |
| pSC101_HygR_serU | Recoded pheS-HygRdoubleselectioncassette serU tRNA | none | This study |
| | under lpp promoter | | |
| pSC101_HygR_ctrl | Recoded pheS-HygRdoubleselectioncassette no tRNA | none | This study |
| pSC101_HygR_alaT_ | Recoded pheS-HygRdoubleselectioncassette alaT tRNA | none | This study |
| CGA_alaT_TGA | with CGA chimeric anticodon and alaT tRNA with TGA | | |
| | anticodon under lpp promoter | | |
| pSC101_HygR_alaT_ | Recoded pheS-HygRdoubleselectioncassette alaT tRNA | none | This study |
| CGA_hisR_TGA | with CGA chimeric anticodon and hisR tRNA with TGA | | |
| | anticodon under lpp promoter | | |
| pSC101_HygR_alaT_ | Recoded pheS-HygRdoubleselectioncassette alaT tRNA | none | This study |
| CGA_leuQ_TGA | with CGA chimeric anticodon and leuQ tRNA with TGA | | |
| | anticodon under lpp promoter | | |
| pSC101_HygR_alaT_ | Recoded pheS-HygRdoubleselectioncassette alaT tRNA | none | This study |
| CGA_proM_TGA | with CGA chimeric anticodon and proM tRNA with TGA | | |
| | anticodon under lpp promoter | | |
| pSC101_HygR_hisR_ | Recoded pheS-HygRdoubleselectioncassette hisR tRNA | none | This study |
| CGA_alaT_TGA | with CGA chimeric anticodon and alaT tRNA with TGA | | |
| | anticodon under lpp promoter | | |
| pSC101_HygR_hisR_ | Recoded pheS-HygRdoubleselectioncassette hisR tRNA | none | This study |
| CGA_hisR_TGA | with CGA chimeric anticodon and hisR tRNA with TGA | | |
| | anticodon under lpp promoter | | |
| pSC101_HygR_hisR_ | Recoded pheS-HygRdoubleselectioncassette hisR tRNA | none | This study |
| CGA_leuQ_TGA | with CGA chimeric anticodon and leuQ tRNA with TGA | | |
| | anticodon under lpp promoter | | |
| pSC101_HygR_hisR_ | Recoded pheS-HygRdoubleselectioncassette hisR tRNA | none | This study |
| CGA_proM_TGA | with CGA chimeric anticodon and proM tRNA with TGA | | |
| | anticodon under lpp promoter | | |
| pSC101_HygR_leuQ_ | Recoded pheS-HygRdoubleselectioncassette leuQ tRNA | none | This study |
| CGA_alaT_TGA | with CGA chimeric anticodon and alaT tRNA with TGA | | |
| | anticodon under lpp promoter | | |
| pSC101_HygR_leuQ_ | Recoded pheS-HygRdoubleselectioncassette leuQ tRNA | none | This study |
| CGA_hisR_TGA | with CGA chimeric anticodon and hisR tRNA with TGA | | |
| | anticodon under lpp promoter | | |
| pSC101_HygR_leuQ_ | Recoded pheS-HygRdoubleselectioncassette leuQ tRNA | none | This study |
| CGA_leuQ_TGA | with CGA chimeric anticodon and leuQ tRNA with TGA | | |
| | anticodon under lpp promoter | | |
| pSC101_HygR_leuQ_ | Recoded pheS-HygRdoubleselectioncassette leuQ tRNA | none | This study |
| CGA_proM_TGA | with CGA chimeric anticodon and proM tRNA with TGA | | |
| | anticodon under lpp promoter | | |
| pSC101_HygR_proM_ | Recoded pheS-HygRdoubleselectioncassette proM tRNA | none | This study |
| CGA_alaT_TGA | with CGA chimeric anticodon and alaT tRNA with TGA | | |
| | anticodon under lpp promoter | | |
| pSC101_HygR_proM_ | Recoded pheS-HygRdoubleselectioncassette proM tRNA | none | This study |
| CGA_hisR_TGA | with CGA chimeric anticodon and hisR tRNA with TGA | | |
| | anticodon under lpp promoter | | |
| pSC101_HygR_proM_ | Recoded pheS-HygRdoubleselectioncassette proM tRNA | none | This study |
| CGA_leuQ_TGA | with CGA chimeric anticodon and leuQ tRNA with TGA | | |
| | anticodon under lpp promoter | | |
| pSC101_HygR_proM_ | Recoded pheS-HygRdoubleselectioncassette proM tRNA | none | This study |
| CGA_proM_TGA | with CGA chimeric anticodon and proM tRNA with TGA | | |
| | anticodon under lpp promoter | | |
| pSC101_KanR_alaT_CGA | Recoded KanR alaT tRNA with CGA chimeric anticodon | none | This study |
| | in endogenous genomic context of serT | | |
| pSC101_KanR_alaT_TGA | Recoded KanR alaT tRNA with TGA chimeric anticodon | none | This study |
| | in endogenous genomic context of serT | | |
| pSC101_KanR_hisR_CGA | Recoded KanR hisR tRNA with CGA chimeric anticodon | none | This study |
| | in endogenous genomic context of serT | | |
| pSC101_KanR_hisR_TGA | Recoded KanR hisR tRNA with TGA chimeric anticodon | none | This study |
| | in endogenous genomic context of serT | | |
| pSC101_KanR_leuQ_CGA | Recoded KanR leuQ tRNA with CGA chimeric anticodon | none | This study |
| | in endogenous genomic context of serT | | |
| pSC101_KanR_leuQ_TGA | Recoded KanR leuQ tRNA with TGA chimeric anticodon | none | This study |
| | in endogenous genomic context of serT | | |
| pSC101_KanR_proM_CGA | Recoded KanR proM tRNA with CGA chimeric anticodon | none | This study |
| | in endogenous genomic context of serT | | |
| pSC101_KanR_proM_TGA | Recoded KanR proM tRNA with TGA chimeric anticodon | none | This study |
| | in endogenous genomic context of serT | | |
| pSC101_KanR_serT | Recoded KanR serT tRNA in endogenous genomic | none | This study |
| | context of serT | | |
| pSC101_KanR_serU | Recoded KanR serU tRNA in endogenous genomic | none | This study |
| | context of serT | | |
| pSC101_KanR_ctrl | Recoded KanR no tRNA | none | This study |
| pSC101_KanR_alaT_ | Recoded KanR alaT tRNA with CGA chimeric anticodon | none | This study |
| CGA_alaT_TGA | and alaT tRNA with TGA anticodon in endogenous | | |
| | genomic context of serT | | |
| pSC101_KanR_alaT_ | Recoded KanR alaT tRNA with CGA chimeric anticodon | none | This study |
| CGA_hisR_TGA | and hisR tRNA with TGA anticodon in endogenous | | |
| | genomic context of serT | | |
| pSC101_KanR_alaT_ | Recoded KanR alaT tRNA with CGA chimeric anticodon | none | This study |
| CGA_leuQ_TGA | and leuQ tRNA with TGA anticodon in endogenous | | |
| | genomic context of serT | | |
| pSC101_KanR_alaT_ | Recoded KanR alaT tRNA with CGA chimeric anticodon | none | This study |
| CGA_proM_TGA | and proM tRNA with TGA anticodon in endogenous | | |
| | genomic context of serT | | |
| pSC101_KanR_hisR_ | Recoded KanR hisR tRNA with CGA chimeric anticodon | none | This study |
| CGA_alaT_TGA | and alaT tRNA with TGA anticodon in endogenous | | |
| | genomic context of serT | | |
| pSC101_KanR_hisR_ | Recoded KanR hisR tRNA with CGA chimeric anticodon | none | This study |
| CGA_hisR_TGA | and hisR tRNA with TGA anticodon in endogenous | | |
| | genomic context of serT | | |
| pSC101_KanR_hisR_ | Recoded KanR hisR tRNA with CGA chimeric anticodon | none | This study |
| CGA_leuQ_TGA | and leuQ tRNA with TGA anticodon in endogenous | | |
| | genomic context of serT | | |
| pSC101_KanR_hisR_ | Recoded KanR hisR tRNA with CGA chimeric anticodon | none | This study |
| CGA_proM_TGA | and proM tRNA with TGA anticodon in endogenous | | |
| | genomic context of serT | | |
| pSC101_KanR_leuQ_ | Recoded KanR leuQ tRNA with CGA chimeric anticodon | none | This study |
| CGA_alaT_TGA | and alaT tRNA with TGA anticodon in endogenous | | |
| | genomic context of serT | | |
| pSC101_KanR_leuQ_ | Recoded KanR leuQ tRNA with CGA chimeric anticodon | none | This study |
| CGA_hisR_TGA | and hisR tRNA with TGA anticodon in endogenous | | |
| | genomic context of serT | | |
| pSC101_KanR_leuQ_ | Recoded KanR leuQ tRNA with CGA chimeric anticodon | none | This study |
| CGA_leuQ_TGA | and leuQ tRNA with TGA anticodon in endogenous | | |
| | genomic context of serT | | |
| pSC101_KanR_leuQ_ | Recoded KanR leuQ tRNA with CGA chimeric anticodon | none | This study |
| CGA_proM_TGA | and proM tRNA with TGA anticodon in endogenous | | |
| | genomic context of serT | | |
| pSC101_KanR_proM_ | Recoded KanR proM tRNA with CGA chimeric anticodon | none | This study |
| CGA_alaT_TGA | and alaT tRNA with TGA anticodon in endogenous | | |
| | genomic context of serT | | |
| pSC101_KanR_proM_ | Recoded KanR proM tRNA with CGA chimeric anticodon | none | This study |
| CGA_hisR_TGA | and hisR tRNA with TGA anticodon in endogenous | | |
| | genomic context of serT | | |
| pSC101_KanR_proM_ | Recoded KanR proM tRNA with CGA chimeric anticodon | none | This study |
| CGA_leuQ_TGA | and leuQ tRNA with TGA anticodon in endogenous | | |
| | genomic context of serT | | |
| pSC101_KanR_proM_ | Recoded KanR proM tRNA with CGA chimeric anticodon | none | This study |
| CGA_proM_TGA | and proM tRNA with TGA anticodon in endogenous | | |
| | genomic context of serT | | |
| pMB1_recAmpR_specR_ | Codon compressed amicilin resistance and | none | This study |
| WT | spectinomycin resistance encoded according to WT | | |
| | genetic code | | |
| pMB1_recAmpR_specR_ | Codon compressed amicilin resistance and codon | none | This study |
| rec | compressed spectinomycin resistance | | |
| pMB1_recAmpR_specR_ | Codon compressed amicilin resistance and | none | This study |
| reassigned | spectinomycin resistance encoded according to | | |
| | orthogonal genetic code (Ala-TCG, His-TCA) | | |
| pMB1_recAmpR_hygR_ | Codon compressed amicilin resistance and hygromycin | none | This study |
| WT | resistance encoded according to WT genetic code | | |
| pMB1_recAmpR_hygR_ | Codon compressed amicilin resistance and codon | none | This study |
| rec | compressed hygromycin resistance | | |
| pMB1_recAmpR_hygR_ | Codon compressed amicilin resistance and hygromycin | none | This study |
| reassigned | resistance encoded according to orthogonal genetic | | |
| | code (Ala-TCG, His-TCA) | | |
| F WT | RK2 conjugation plasmid containing recoded | none | This study |
| | chloramphenicol resistance gene (based on | | |
| | BN000925.1) | | |
| F WT + serT | RK2 conjugation plasmid containing recoded | none | This study |
| | chloramphenicol resistance gene and serT tRNA gene | | |
| | (based on BN000925.1) | | |
| O-F1 | RK2 derived plasmid constructed from synthetic DNA. | none | This study |
| | Recoded according to Syn61 recoding scheme. trfA | | |
| | gene additionally recoded (Ala-TCG, His-TC | | |
| O-F2 | RK2 derived plasmid constructed from synthetic DNA. | none | This study |
| | Recoded according to Syn61 recoding scheme. trfA | | |
| | gene additionally recoded (His-TCG, Ala-TC | | |

### REFERENCES TO MATERIALS AND METHODS

[0407] 1. F. H. Crick, L. Barnett, S. Brenner, R. J. Watts-Tobin, General nature of the genetic code for proteins. Nature 192, 1227-1232 (1961).
[0408] 2. M. W. Nirenberg, J. H. Matthaei, The dependence of cell-free protein synthesis in E. coli upon naturally occurring or synthetic polyribonucleotides. Proc Natl Acad Sci USA 47, 1588-1602 (1961).
[0409] 3. R. J. Hall, F. J. Whelan, J. O. McInerney, Y. Ou, M. R. Domingo-Sananes, Horizontal Gene Transfer as a Source of Conflict and Cooperation in Prokaryotes. Front Microbiol 11, 1569 (2020).
[0410] 4. K. Vetsigian, C. Woese, N. Goldenfeld, Collective evolution and the genetic code. Proc Natl Acad Sci USA 103, 10696-10701 (2006).
[0411] 5. D. de la Torre, J. W. Chin, Reprogramming the genetic code. Nat Rev Genet 22, 169-184 (2021).
[0412] 6. E. V. Koonin, A. S. Novozhilov, Origin and evolution of the genetic code: the universal enigma. IUBMB Life 61, 99-111 (2009).
[0413] 7. M. Kollmar, S. Muhlhausen, Nuclear codon reassignments in the genomics era and mechanisms behind their evolution. Bioessays 39, (2017).
[0414] 8. J. Ling et al., Natural reassignment of CUU and CUA sense codons to alanine in Ashbya mitochondria. Nucleic Acids Res 42, 499-508 (2014).
[0415] 9. A. L. Borges et al., Widespread stop-codon recoding in bacteriophages may regulate translation of lytic genes. Nat Microbiol 7, 918-927 (2022).
[0416] 10. M. A. Santos, A. C. Gomes, M. C. Santos, L. C. Carreto, G. R. Moura, The genetic code of the fungal CTG clade. C R Biol 334, 607-611 (2011).
[0417] 11. D. J. Taylor, M. J. Ballinger, S. M. Bowman, J. A. Bruenn, Virus-host co-evolution under a modified nuclear genetic code. PeerJ 1, e50 (2013).
[0418] 12. Y. Shulgina, S. R. Eddy, A computational screen for alternative genetic codes in over 250,000 genomes. Elife 10, (2021).
[0419] 13. D. G. Gibson et al., Complete chemical synthesis, assembly, and cloning of a Mycoplasma genitalium genome. Science 319, 1215-1220 (2008).
[0420] 14. D. G. Gibson et al., One-step assembly in yeast of 25 overlapping DNA fragments to form a complete synthetic Mycoplasma genitalium genome. Proc Natl Acad Sci USA 105, 20404-20409 (2008).
[0421] 15. J. Fredens et al., Total synthesis of Escherichia coli with a recoded genome. Nature 569, 514-+(2019).
[0422] 16. F. J. Isaacs et al., Precise manipulation of chromosomes in vivo enables genome-wide codon replacement. Science 333, 348-353 (2011).
[0423] 17. M. J. Lajoie et al., Genomically recoded organisms expand biological functions. Science 342, 357-360 (2013).
[0424] 18. W. E. Robertson et al., Sense codon reassignment enables viral resistance and encoded polymer synthesis. Science 372, 1057-1062 (2021).
[0425] 19. G. Pines, J. D. Winkler, A. Pines, R. T. Gill, Refactoring the Genetic Code for Increased Evolvability. mBio 8, (2017).
[0426] 20. J. Calles, I. Justice, D. Brinkley, A. Garcia, D. Endy, Fail-safe genetic codes designed to intrinsically contain engineered organisms. Nucleic Acids Res 47, 10439-10451 (2019).
[0427] 21. M. Schmidt, V. Kubyshkin, How To Quantify a Genetic Firewall? A Polarity-Based Metric for Genetic Code Engineering. Chembiochem 22, 1268-1284 (2021).
[0428] 22. D. S. Marks, S. W. Michnick, Democratizing the mapping of gene mutations to protein biophysics. Nature 604, 47-48 (2022).
[0429] 23. S. Teng, A. K. Srivastava, C. E. Schwartz, E. Alexov, L. Wang, Structural assessment of the effects of amino acid substitutions on protein stability and protein protein interaction. Int J Comput Biol Drug Des 3, 334-349 (2010).
[0430] 24. V. Parthiban, M. M. Gromiha, D. Schomburg, CUPSAT: prediction of protein stability upon point mutations. Nucleic Acids Res 34, W239-242 (2006).
[0431] 25. P. C. Ng, S. Henikoff, Predicting the effects of amino acid substitutions on protein function. Annu Rev Genomics Hum Genet 7, 61-80 (2006).
[0432] 26. B. A. Renda, M. J. Hammerling, J. E. Barrick, Engineering reduced evolutionary potential for synthetic biology. Mol Biosyst 10, 1668-1678 (2014).
[0433] 27. G. Moratorio et al., Attenuation of RNA viruses by redirecting their evolution in sequence space. Nat Microbiol 2, 17088 (2017).
[0434] 28. J. R. Coleman et al., Virus attenuation by genome-scale changes in codon pair bias. Science 320, 1784-1787 (2008).
[0435] 29. P. W. Barone et al., Viral contamination in biologic manufacture and implications for emerging therapies. Nat Biotechnol 38, 563-572 (2020).
[0436] 30. P. Alamos et al., Functionality of tRNAs encoded in a mobile genetic element from an acidophilic bacterium. RNA Biol 15, 518-527 (2018).
[0437] 31. T. Tuller et al., Association between translation efficiency and horizontal gene transfer within microbial communities. Nucleic Acids Res 39, 4743-4755 (2011).
[0438] 32. J. W. Lee, C. T. Y. Chan, S. Slomovic, J. J. Collins, Next-generation biocontainment systems for engineered organisms. Nat Chem Biol 14, 530-537 (2018).
[0439] 33. W. E. Robertson et al., Creating custom synthetic genomes in Escherichia coli with REXER and GENESIS. Nat Protoc 16, 2345-2380 (2021).
[0440] 34. K. C. Murphy, lambda Recombination and Recombineering. EcoSal Plus 7, (2016).
[0441] 35. K. Wang et al., Defining synonymous codon compression schemes by genome recoding. Nature 539, 59-64 (2016).

1. A cell that:
comprises a genome wherein at least a first type of sense codon has been recoded such that a first endogenous tRNA is dispensable;
does not express the first endogenous tRNA;
expresses a first modified tRNA capable of decoding the first type of sense codon, wherein the first modified tRNA is charged with a first amino acid that is not a naturally cognate amino acid for the first type of sense codon; and
comprises a gene required for viability, wherein the gene comprises at least one occurrence of the first type of sense codon and the cell is viable when the first type of sense codon in said gene is decoded as the first amino acid.

2. The cell of claim 1, wherein the first modified tRNA is an anticodon-swapped tRNA canonically associated with the first amino acid.

3. The cell of claim 1, wherein the first modified tRNA is derived from a tRNA that is endogenous to the cell and is an isoacceptor for the first amino acid, or is derived from a tRNA found in a mobile genetic element and is an isoacceptor for the first amino acid.

4. The cell of claim 1, wherein the cell is not viable if the first type of sense codon in the gene required for viability is decoded according to the canonical genetic code, or wherein the first type of sense codon in the gene required for viability at least partially contributes to a loss of viability if decoded according to the canonical genetic code.

5. The cell of claim 1, wherein the gene required for viability is an essential gene or a positive selectable marker.

6. The cell of claim 1, wherein the first amino acid is a naturally occurring amino acid.

7. The cell of claim 1, wherein a second type of sense codon has been recoded within the genome.

8. The cell of claim 7, wherein a second endogenous tRNA is dispensable and the cell does not express the second endogenous tRNA.

9. The cell of claim 7, wherein the cell expresses a second modified tRNA, which is capable of decoding the second type of sense codon, wherein the second modified tRNA is charged with a second amino acid that is not a naturally cognate amino acid for the second type of sense codon.

10. The cell of claim 9, wherein a gene required for viability comprises at least one occurrence of the second type of sense codon and the cell is viable when the second type of sense codon in said gene is decoded as the second amino acid.

11. The cell of claim 10, wherein the cell is not viable if the second type of sense codon in the gene required for viability is decoded according to the canonical genetic code, or wherein the second type of sense codon at least partially contributes to a loss of viability if decoded according to the canonical genetic code.

12. The cell of claim 9, wherein the second modified tRNA:
(a) is an anticodon-swapped tRNA canonically associated with the second amino acid; or
(b) is derived from a tRNA that is endogenous to the cell and is an isoacceptor for the second amino acid, or is derived from a tRNA found in a mobile genetic element and is an isoacceptor for the second amino acid.

13. (canceled)

14. The cell of claim 9, wherein the second amino acid is a naturally occurring amino acid.

15. The cell of claim 9, wherein the first and the second amino acids are the same type of amino acid or are different types of amino acid.

16. The cell of claim 7, wherein:
(a) the first type of sense codon is TCA and the second type of sense codon is TCG; or
(b) the first type of sense codon is TCA or TCG.

17. (canceled)

18. The cell of claim 1, wherein the cell is viable when its genes are decoded by the modified tRNA(s) and is non-viable when its genes are decoded at least partially according to the canonical genetic code.

19. A cell that:
comprises a genome wherein a first type of sense codon and a second type of sense codon have been recoded such that a first endogenous tRNA and a second endogenous tRNA are dispensable;
does not express the first endogenous tRNA and the second endogenous tRNA;
expresses a first anticodon-swapped tRNA derived from a naturally occurring first parent tRNA, wherein the first anticodon-swapped tRNA is charged with a first amino acid and the first parent tRNA is an isoacceptor for the first amino acid, and wherein the first amino acid is not a naturally cognate amino acid for the first type of sense codon; and
expresses a second anticodon-swapped tRNA derived from a naturally occurring second parent tRNA, wherein the second anticodon-swapped tRNA is charged with a second amino acid and the second parent tRNA is an isoacceptor for the second amino acid, and wherein the second amino acid is not a naturally cognate amino acid for the second type of sense codon;
wherein the first and/or second modified tRNA cannot decode any type of codon apart from the first type of sense codon and/or the second type of sense codon.

20. The cell of claim 19, wherein:
(a) the first and the second type of sense codon canonically encode the same amino acid;
(b) the first and the second type of sense codon would canonically be decoded by the same tRNA or overlapping tRNAs due to wobble base pairing, wherein the first anticodon-swapped tRNA cannot decode any codon type apart from the first type of sense codon and/or the second anticodon-swapped tRNA cannot decode any codon type apart from the second type of sense codon;
(c) the first and the second type of sense codon are of the formula XXN, and wherein the first anticodon-swapped tRNA cannot decode the second type of sense codon, and the second anticodon-swapped tRNA cannot decode the first type of sense codon;
(d) the first and the second type of sense codon canonically encode serine, the first and the second type of sense codon canonically encode alanine, or the first and the second type of sense codon canonically encode leucine; or
(e) the first type of sense codon is TCA and/or the second type of sense codon is TCG.

21. (canceled)

22. (canceled)

23. The cell of claim 19, wherein;
(a) the first amino acid and the second amino acid are different types of amino acids;
(b) the first and/or second amino acid is a naturally occurring amino acid.

24. The cell of claim 19, wherein the first and second parent tRNAs are derived from the same cell type as the cell of claim 19.

25. The cell of claim 19, wherein the first and/or second anticodon-swapped tRNA;
(a) comprise identity elements that are recognised by an aminoacyl-tRNA synthetase endogenous to the cell; or
(b) does not decode TCC or TCT codons.

26-29. (canceled)

30. The cell of claim 19, wherein the first amino acid is any one of alanine, histidine, leucine, and proline; and/or the second amino acid is any one of alanine, histidine, leucine, and proline.

31. The cell of claim 19, wherein the first and/or second anticodon-swapped tRNA is derived from a parent tRNA encoded by ArgQ, ArgU, GltU, HisR, ProK, ProL, ProM, TrpT, ThrU, ThrT, TyrU, TyrV, AlaT, or LeuQ.

32. The cell of claim 31, wherein the first and/or second anticodon-swapped tRNA is derived from a parent tRNA encoded by HisR, ProM, AlaT, or LeuQ.

33. The cell of claim 19, wherein the parent tRNA is an E. coli tRNA.

34. A cell that:
comprises a genome wherein a first type of sense codon and a second type of sense codon have been recoded such that a first endogenous tRNA and a second endogenous tRNA are dispensable;
does not express the first endogenous tRNA and the second endogenous tRNA;
expresses a first modified tRNA capable of decoding the first type of sense codon, wherein the first modified tRNA is charged with a first amino acid that is not a naturally cognate amino acid for the first type of sense codon; and
expresses a second modified tRNA capable of decoding the second type of sense codon, wherein the second modified tRNA is charged with a second amino acid that is not a naturally cognate amino acid for the second type of sense codon;
wherein:
i) the first amino acid is alanine and the second amino acid is alanine;
ii) the first amino acid is alanine and the second amino acid is histidine;
iii) the first amino acid is alanine and the second amino acid is leucine;
iv) the first amino acid is alanine and the second amino acid is proline;
v) the first amino acid is histidine and the second amino acid is alanine;
vi) the first amino acid is histidine and the second amino acid is histidine;
vii) the first amino acid is histidine and the second amino acid is leucine;
viii) the first amino acid is histidine and the second amino acid is proline;
ix) the first amino acid is leucine and the second amino acid is alanine;
x) the first amino acid is leucine and the second amino acid is histidine;
xi) the first amino acid is leucine and the second amino acid is proline;
xii) the first amino acid is proline and the second amino acid is alanine;
xiii) the first amino acid is proline and the second amino acid is histidine;
xiv) the first amino acid is proline and the second amino acid is leucine; or
xv) the first amino acid is proline and the second amino acid is proline.

35. The cell of claim 34, wherein;
(a) the first modified tRNA cannot decode the second type of sense codon and/or the second modified tRNA cannot decode the first type of sense codon; or
(b) the first modified tRNA cannot decode any type of codon apart from the first type of sense codon and/or the second modified tRNA cannot decode any type of codon apart from the second type of sense codon.

36. (canceled)

37. The cell of claim 34, wherein the first modified tRNA is an anticodon-swapped tRNA canonically associated with the first amino acid, and/or the second modified tRNA is an anticodon-swapped tRNA canonically associated with the second amino acid.

38. The cell of claim 34, wherein the first modified tRNA is derived from a tRNA that is endogenous to the cell and is an isoacceptor for the first amino acid, or is derived from a tRNA found in a mobile genetic element and is an isoacceptor for the first amino acid; and/or the second modified tRNA is derived from a tRNA that is endogenous to the cell and is an isoacceptor for the second amino acid, or is derived from a tRNA found in a mobile genetic element and is an isoacceptor for the second amino acid.

39. The cell of claim 34, wherein the first and/or second modified tRNA comprise identity elements that are recognised by an aminoacyl-tRNA synthetase endogenous to the cell.

40. The cell of claim 34, wherein:
(a) the first and the second type of sense codon canonically encode serine; or
(b) the first type of sense codon is TCA and/or the second type of sense codon is TCG.

41. (canceled)

42. The cell of claim 7, wherein the essential genes of the genome do not contain naturally occurring instances of the second type of sense codon, and the second endogenous tRNA is a cognate tRNA for the second type of sense codon.

43. The cell of claim 7, wherein the genome comprises 10, 9, 8, 7, 6, 5, 4, 3, 2, 1, or no naturally occurring instances of the second type of sense codon, and the second endogenous tRNA is a cognate tRNA for the second type of sense codon.

44. The cell of claim 7, wherein the second type of sense codon is TCG and the second endogenous tRNA is tRNASerCGA.

45. The cell of claim 1, wherein the essential genes of the genome do not contain naturally occurring instances of the first type of sense codon, and the first endogenous tRNA is a cognate tRNA for the first type of sense codon.

46. The cell of claim 1, wherein the genome comprises 10, 9, 8, 7, 6, 5, 4, 3, 2, 1, or no naturally occurring instances of the first type of sense codon, and the first endogenous tRNA is a cognate tRNA for the first type of sense codon.

47. The cell of claim 1, wherein the first type of sense codon is TCA and the first endogenous tRNA is tRNASerUGA or the first type of sense codon is TCG and the first endogenous is tRNASerCGA.

48. The cell of claim 1, wherein a plurality of naturally occurring instances of the TCA codon have been replaced with AGT and/or a plurality of naturally occurring instances of the TCG codon have been replaced with AGC.

49. The cell of claim 1, wherein the cell has increased resistance to horizontal gene transfer or mobile genetic elements.

50. The cell of claim 1, wherein the cell's genome is at least 80%, 85%, 90%, 95%, 98%, 99%, 99.5%, 99.8%, 99.9%, or 100% identical to any one of SEQ ID NOs: 1 to 6.

51. The cell of claim 1, wherein the cell is prokaryotic cell, a bacterial cell, or an Escherichia coli cell.

52. A method of increasing the resistance of a cell to mobile genetic elements or horizontal gene transfer, wherein the cell has been modified to reassign at least one type of sense codon to an amino acid not associated with the sense codon in the canonical genetic code, said method comprising:
modifying a gene required for viability to include at least one occurrence of the reassigned sense codon, wherein
the cell is viable if the reassigned sense codon in said gene is decoded as the reassigned amino acid, and
the cell is not viable if the reassigned sense codon in said gene is decoded according to the canonical genetic code, or wherein the reassigned sense codon in said gene at least partially contributes to a loss of viability if decoded according to the canonical genetic code.

53-59. (canceled)

60. A method of altering susceptibility of a gene to mutations that alter the encoded amino acid sequence, the method comprising:
i) identifying a target gene; and
ii) incubating a cell comprising the target gene, wherein the cell comprises a tRNA capable of decoding at least one sense codon to a reassigned amino acid, wherein the cell is according to claim 1.

61-64. (canceled)

65. A method for making a polymer, the method comprising:
culturing a cell according to claim 1,
providing the cell with a nucleic acid sequence encoding the polymer, and
obtaining the polymer.

The application's sequence listing, which the Patent Office published only in electronic form, follows.

SEQUENCE LISTING (70 sequences)

SEQ ID NO: 1 - DNA, 3979104 bp, Escherichia coli (residues 1-1,989,552 of 3,979,104)
  source 1..3979104: mol_type = genomic DNA
agcttttcattctgactgcaacgggcaatatgtctctgtgtggattaaaaaaagagtgtctgatagcagcttctgaactggttacctgccgtgagtaaattaaaattttattgacttaggtcactaaatactttaaccaatataggcatagcgcacagacagataaaaattacagagtacacaacatccatgaaacgcattagcaccaccattaccaccaccatcaccattaccacaggtaacggtgcgggctgacgcgtacaggaaacacagaaaaaagcccgcacctgacagtgcgggctttttttttcgaccaaaggtaacgaggtaacaaccatgcgagtgttgaagttcggcggtacaagtgtggcaaatgcagaacgttttctgcgtgttgccgatattctggaaagcaatgccaggcaggggcaggtggccaccgtcctctctgcccccgccaaaatcaccaaccacctggtggcgatgattgaaaaaaccattagcggccaggatgctttacccaatatcagcgatgccgaacgtatttttgccgaacttttgacgggactcgccgccgcccagccggggttcccgctggcgcaattgaaaactttcgtcgatcaggaatttgcccaaataaaacatgtcctgcatggcattagtttgttggggcagtgcccggatagcatcaacgctgcgctgatttgccgtggcgagaaaatgagcatcgccattatggccggcgtattagaagcgcgcggtcacaacgttactgttatcgatccggtcgaaaaactgctggcagtggggcattacctcgaatctaccgtcgatattgctgagtccacccgccgtattgcggcaagccgcattccggctgatcacatggtgctgatggcaggtttcaccgccggtaatgaaaaaggcgaactggtggtgcttggacgcaacggttccgactactctgctgcggtgctggctgcctgtttacgcgccgattgttgcgagatttggacggacgttgacggggtctatacctgcgacccgcgtcaggtgcccgatgcgaggttgttgaagagcatgtcctaccaggaagcgatggagctttcctacttcggcgctaaagttcttcacccccgcaccattacccccatcgcccagttccagatcccttgcctgattaaaaataccggaaatcctcaagcaccaggtacgctcattggtgccagccgtgatgaagacgaattaccggtcaagggcatttccaatctgaataacatggcaatgttcagcgtttctggtccggggatgaaagggatggtcggcatggcggcgcgcgtctttgcagcgatgagtcgcgcccgtatttccgtggtgctgattacgcaaagttcttccgaatacagcatcagtttctgcgttccacaaagcgactgtgtgcgagctgaacgggcaatgcaggaagagttctacctggaactgaaagaaggcttactggagccgctggcagtgacggaacggctggccattatcagcgtggtaggtgatggtatgcgcaccttgcgtgggatcagcgcgaaattctttgccgcactggcccgcgccaatatcaacattgtcgccattgctcagggatcttctgaacgcagtatctctgtcgtggtaaataacgatgatgcgaccactggcgtgcgcgttactcatcagatgctgttcaataccgatcaggttatcgaagtgtttgtgattggcgtcggtggcgttggcggtgcgctgctggagcaactgaagcgtcagcaaagctggctgaagaataaacatatcgacttacgtgtctgcggtgttgccaacagcaaggctctgctcaccaatgtacatggccttaatctggaaaactggcaggaagaactggcgcaagccaaagagccgtttaatctcgggcgcttaattcgcctcgtgaaagaatatcatctgctgaacccggtcattgttgactgcacttccagccaggcagtggcggatcaatatgccgacttcctgcgcgaaggtttccacgttgtcacgccgaacaaaaaggccaacaccagcagcatggattactaccatcagttgcgttatgcggcggaaaaaagccggcgtaaattcctctatgacaccaacgttggggctggattaccggttattgagaacctgcaaaatctgctcaatgcaggtgatgaattgatgaagttctccggcattctttctggtagcctttcttatatcttcggcaagttagacgaaggcatgagtttctccgaggcgaccacgctggcgcgggaaatgggttataccgaaccggacccgcgagatgatctttctggtatggatgtggcgcgtaaactattgattctcgctcgtgaaacgggacgtgaactggagctggcggatattgaaattgaacctgtgctgcccgcagagtttaacgccgagggtgatgttgccgcttttatggcgaatctgagtcaactcgacgatctctttgccgcgcgcgtggcgaaggcccgtgatgaaggaaaagttttgcgctatgttggcaatattgatgaagatggcgtctgccgcgtgaagattgccgaagtggatggtaatgatccgctgttcaaagtgaaaaatggcgaaaacgccctggccttctatagccactattatcagccgctgccgttggtactgcgcggatatggtgcgggcaatgacgttacagctgccggtgtctttgctgatctgctacgtaccctcagttggaagttaggagtctgacatggttaaagtttatgccccggcttccagtgccaatatgagcgtcgggtttgatgtgctcggggcggcggtgacacctgttgatggtgcattgctcggagatgtagtcacggttgaggcggcagagacattcagtctcaacaacctcggacgctttgccgataagctgccgagtgaaccacgggaaaatatcgtttatcagtgctgggagcgtttttgccaggaactgggtaagcaaattccagtggcgatgaccctggaaaagaatatgccgatcggtagcggcttaggctccagtgcctgtagcgtggtcgcggcgctgatggcgatgaatgaacactgcggcaagccgcttaatgacactcgtttgctggctttgatgggcgagctggaaggccgtatctccggcagcattcattacgacaacgtggcaccgtgttttctcggtggtatgcagttgatgatcgaagaaaacgacatcatcagccagcaagtgccagggtttgatgagtggctgtgggtgctggcgtatccggggattaaagtcagcacggcagaagccagggctattttaccggcgcagtatcgccgccaggattgcattgcgcacgggcgacatctggcaggcttcattcacgcctgctattcccgtcagcctgagcttgccgcgaagctgatgaaagatgttatcgctgaaccctaccgtgaacggttactgccaggcttccggcaggcgcggcaggcggtcgcggaaatcggcgcggtagcgagcggtatctccggctccggcccgaccttgttcgctctgtgtgacaagccggaaaccgcccagcgcgttgccgactggttgggtaagaactacctgcaaaatcaggaaggttttgttcatatttgccggctggatacggcgggcgcacgagtactggaaaactaaatgaaactctacaatctgaaagatcacaacgagcaggtcagctttgcgcaagccgtaacccaggggttgggcaaaaatcaggggctgttttttccgcacgacctgccggaattcagcctgactgaaattgatgagatgctgaagctggattttgtcacccgcagtgcgaagatcctcagcgcgtttattggtgatgaaatcccacaggaaatcctggaagagcgcgtgcgcgcggcgtttgccttcccggctccggtcgccaatgttgaaagcgatgtcggttgtctggaattgttccacgggccaacgctggcatttaaagatttcggcggtcgctttatggcacaaatgctgacccatattgcgggtgataagccagtgaccattctgaccgcgacctccggtgataccggagcggcagtggctcatgctttctacggtttaccgaatgtgaaagtggttatcctctatccacgaggcaaaatcagtccactgcaagaaaaactgttctgtacattgggcggcaatatcgaaactgttgccatcgacggcgatttcgatgcctgtcaggcgctggtgaagcaggcgtttgatgatgaagaactgaaagtggcgctagggttaaacagcgctaacagcattaacatcagccgtttgctggcgcagatttgctactactttgaagctgttgcgcagctgccgcaggagacgcgcaaccagctggttgtcagcgtgccaagcggaaacttcggcgatttgacggcgggtctgctggcgaagagtctcggtctgccggtgaaacgttttattgctgcgaccaacgtgaacgataccgtgccacgtttcctgcacgacggtcagtggagtcccaaagcgactcaggcgacgttatccaacgcgatggacgtgagtcagccgaacaactggccgcgtgtggaagagttgttccgccgcaaaatctggcaactgaaagagctgggttatgcagccgtggatgatgaaaccacgcaacagacaatgcgtgagttaaaagaactgggctacactagcgagccgcacgctgccgtagcttatcgtgcgctgcgtgatcagttgaatccaggcgaatatggcttgttcctcggcaccgcgcatccggcgaaatttaaagagagcgtggaagcgattctcggtgaaacgttggatctgccaaaagagctggcagaacgtgctgatttacccttgcttagtcataatctgcccgccgattttgctgcgttgcgtaaattgatgatgaatcatcagtaaaatctattcattatctcaatcaggccgggtttgcttttatgcagcccggcttttttatgaagaaattatggagaaaaatgacagggaaaaaggagaaattctcaataaatgcggtaacttagagattaggattgcggagaataacaaccgccgttctcatcgagtaatctccggatatcgacccataacgggcaatgataaaaggagtaacctgtgaaaaagatgcaatctatcgtactcgcactttccctggttctggtcgctcccatggcagcacaggctgcggaaattacgttagtcccgagtgtaaaattacagataggcgatcgtgataatcgtggctattactgggatggaggtcactggcgcgaccacggctggtggaaacaacattatgaatggcgaggcaatcgctggcacctacacggaccgccgccaccgccgcgccaccataagaaagctcctcatgatcatcacggcggtcatggtccaggcaaacatcaccgctaaatgacaaatgccgggtaacaatccggcattcagcgcctgatgcgacgctggcgcgtcttatcaggcctacgttaattctgcaatatattgaatctgcatgcttttgtaggcaggataaggcgttcacgccgcatccggcattgactgcaaacttaacgctgctcgtagcgtttaaacaccagttcgccattgctggaggaatcttcatcaaagaagtaaccttcgctattaaaaccagtcagttgctctggtttggtcagccgattttcaataatgaaacgactcatcagaccgcgtgctttcttagcgtagaagctgatgatcttaaatttgccgttcttctcatcgaggaacaccggcttgataatctcggcattcaatttcttcggcttcacgcttttaaaatactcatcactcgccagattaatcaccacattatcgccttgtgctgcgagcgcctcgttcagcttgttggtgatgatatctccccagaattgatacagatctttccctcgggcattctcaagacggatccccatttccagacgataaggctgcattaaatcgagcgggcggagtacgccatacaagccggaaagcattcgcaaatgctgttgggcaaaatcgaaatcgtcttcgctgaaggtttcggcctgcaagccggtgtagacatcacctttaaacgccagaatcgcctggcgggcattcgccggcgtgaaatctggctgccagtcatgaaagcgagcggcgttgatacccgccagtttgtcgctgatgcgcatcagcgtgctaatctgcggaggcgtcagtttccgcgcctcatggatcaactgctgggaattgtctaacagctccggcagcgtatagcgcgtggtggtcaacgggctttggtaatcaagcgttttcgcaggactaataagaatcagcatatccagtccttgcaggaaatttatgccgactttagcaaaaaatgagaatgagttgatcgatagttgtgattactcctggctaacatcatcccacgcgtccggagaaagctggcgaccgatatccggataacgcaatggatcaaacaccgggcgcacgccgagtttacgctggcgtagataatcactggcaatggtatgaaccacagggctgagcagtaaaatggcggtcaaattggtaatagccatgcaggccattatgatatctgccagttgccacatcagcggaaggcttagcaaggtgccgccgatgaccgttgcgaaggtgcagatccgcaaacaccagatcgctttagggttgttcaggcgtaaaaagaagagattgttttcggcataaatgtagttggcaacgatggagctgaaggcaaacagaataaccacaagggtaacaaactcagcaccccaggaacccattagcacccgcatcgccttctggataagctgaataccttccagcggcatgtaggttgtgccgttacccgccagtaatatcagcatggcgcttgccgtacagatgaccagggtgtcgataaaaatgccaatcatctggacaatcccttgcgctgccggatgcggaggccaggacgccgctgccgctgccgcgtttggcgtgctacccattcccgcctcattggaaaacatactgcgctgaaaaccgttagtaatcgcctggcttaaggtatatcccgccgcgccgcctgccgcttcctgccagccaaaagcactctcaaaaatagaccaaatgacgtggggaagttgcccgatattcattacgcaaattaccaggctggtcagtacccagattatcgccatcaacgggacaaagccctgcatgagccgggcgacgccatgaagaccgcgagtgattgccagcagagtaaagacagcgagaataatgcctgtcaccagcgggggaaaatcaaaagaaaaactcagggcgcgggcaacggcgttcgcttgaactccgctgaaaattatgccataggcgatgagcaaaaagacggcgaacagaacgcccatccagcgcatccccagcccgcgcgccatataccatgccggtccgccacgaaactgcccattgacgtcacgttctttataaagttgtgccagagaacattcggcaaagctggtcgccatgccgataaacgcggcaacccacatccaaaagacggctccaggtccaccggcggtaatagccagcgcaacgccggccaggttgccgctacccacgcgcgccgcaagactggtacacaaactctgaaaactggttaaaccgcctggctgtggatgaatgctatttttaagacttttgccaaactggcggatgtagcgaaactgcacaaatccggtgcgaaaagtgaaccaacaacctgcgccgaagagcaggtaaatcattacgcttccccaaaggacgctgttaatgaaggagaaaaaatctggcatgcatatccctcttattgccggccgcgatgactttcctgtgtaaacgttaccaattgtttaagaagtatatacgctacgaggtacttgataacttctgcgtagcatacatgaggttttgtataaaaatggcgggcgatatcaacgcagtgtcagaaatccgaaacagtctcgcctggcgataaccgtcttgtcggcggttgcgctgacgttgcgtcgtgatatcatcagggcagaccggttacatccccctaacaagctgtttaaagagaaatactatcatgacggacaaattgacctcccttcgtcagtacaccaccgtagtggccgacactggggacatcgcggcaatgaagctgtatcaaccgcaggatgccacaaccaacccttctctcattcttaacgcagcgcagattccggaataccgtaagttgattgatgatgctgtcgcctgggcgaaacagcagagcaacgatcgcgcgcagcagatcgtggacgcgaccgacaaactggcagtaaatattggtctggaaatcctgaaactggttccgggccgtatcagtactgaagttgatgcgcgtctttcctatgacaccgaagcgagtattgcgaaagcaaaacgcctgatcaaactctacaacgatgctggtattagcaacgatcgtattctgatcaaactggcttctacctggcagggtatccgtgctgcagaacagctggaaaaagaaggcatcaactgtaacctgaccctgctgttctccttcgctcaggctcgtgcttgtgcggaagcgggcgtgttcctgatcagcccgtttgttggccgtattcttgactggtacaaagcgaataccgataagaaagagtacgctccggcagaagatccgggcgtggtttctgtatctgaaatctaccagtactacaaagagcacggttatgaaaccgtggttatgggcgcaagcttccgtaacatcggcgaaattctggaactggcaggctgcgaccgtctgaccatcgcaccggcactgctgaaagagctggcggagagcgaaggggctatcgaacgtaaactgtcttacaccggcgaagtgaaagcgcgtccggcgcgtatcactgagtccgagttcctgtggcagcacaaccaggatccaatggcagtagataaactggcggaaggtatccgtaagtttgctattgaccaggaaaaactggaaaaaatgatcggcgatctgctgtaatcattcttagcgtgaccgggaagtcggtcacgctacctcttctgaagcctgtctgtcactcccttcgcagtgtatcattctgtttaacgagactgtttaaacggaaaaatcttgatgaatactttacgtattggcttagtttccatctctgatcgcgcatccagcggcgtttatcaggataaaggcatccctgcgctggaagaatggctgacaagcgcgctaaccacgccgtttgaactggaaacccgcttaatccccgatgagcaggcgatcatcgagcaaacgttgtgtgagctggtggatgaaatgagttgccatctggtgctcaccacgggcggaactggcccggcgcgtcgtgacgtaacgcccgatgcgacgctggcagtagcggaccgcgagatgcctggctttggtgaacagatgcgccagatcagcctgcattttgtaccaactgcgatccttagccgtcaggtgggcgtgattcgcaaacaggcgctgatccttaacttacccggtcagccgaagtctattaaagagacgctggaaggtgtgaaggacgctgagggtaacgttgtggtacacggtatttttgccagcgtaccgtactgcattcagttgctggaagggccatacgttgaaacggcaccggaagtggttgcagcattcagaccgaagagtgcaagacgcgacgttagcgaataaaaaaatccccccgagcggggggatctcaaaacaattagtgggattcaccaatcggcagaacggtgcgaccaaactgctcgttcagtacttcacccatcgccagatagattgcgctggcaccgcagatcagcccaatccagccggcaaagtggatgattgcggcgttaccggcaatgttaccgatcgccagcagggcaaacagcacggtcaggctaaagaaaacgaattgcagaacgcgtgcgcctttcagcgtgccgaagaacataaacagcgtaaatacgccccacagacccaggtagacaccaaggaactgtgcatttggcgcatcggtcagacccagtttcggcatcagcagaatcgcaaccagcgtcagccagaaagaaccgtaagaggtgaatgcggttaaaccgaaagtgttgccttttttgtactccagcagaccagcaaaaatttgcgcgatgccgccgtagaaaatgcccatggcaagaataataccgtccagagcgaaataacccacgttgtgcaggttaagcagaatggtggtcatgccgaagcccatcaggcccagcggtgccggattagccaacttagtgttgcccataattcctcaaaaatcatcatcgaatgaatggtgaaataatttccctgaataactgtagtgttttcagggcgcggcataataatcagccagtggggcagtgtctacgatcttttgaggggaaaatgaaaattttccccggtttccggtatcagacctgagtggcgctaaccatccggcgcaggcaggcgatttgcagtacggctggaatcgtcacgcgataggcgctgccgctgaccgctttaaccccatttagtgccgcacctacagggcctcccagccccgcgccgcgcagcaaaccatgcccaagtacgctcattgctgcgtgggtgcgtaaaatgcgggtcagttggctggaaagcaaatggctcacaccttttgccaataatttgtctttcatcagcagcggcagcagctcttccagctcattcaccctggcatcgaccgcgtgcagaaactcctgcttatgttcctcgtccattttcttccaggtattacgcagaaattgttccagtaactgttgctcaatttcaaacgtagacatctctttgtcggctttcagcttcaatcgcttactaacatcgagcaaaatggcccgatacaatttaccgtgtccgcgcagtttgttggcgatactatcgccaccaaaatgctgtaattctccggcaatcagctgccagttgcggcgatgttgctcgggatgcccttccatgcttttaaacagttcgttgcgcatcagtacgctggagaggcgagttttgcctttttcattatgggtgagcaatcgggcgaaatttgccaactgttcctcactacaatgctgaagaaaatccagatcactatcattcaggtaattaacattcattttttgtggcttctatattctggcgttagtcgtcgccgataattttcagcgtggccatatcgctactgttcaccgtatgaccgctaaaggtgattttactgacgcagcgtttattgtcgttatcgctgttaatgttgatccagtcagtggtttgcccttcttttatttcactaggaatattcaggctctgactggcgctacgggcggctttgaaataaacgcttgcaccgcttaactgtaaatcgccatggtcggcagagagttgtatgcgtttcacaatgcgacaaacaggaagtttcagcgccagatcgttggtttcgttacgcggcattgcaatggcgccgaggagtttatggtcgtttgcctgcgccgtgcagcacagcatcaggctaatcgccaggctggcggaaatcgtaaaaacggatttcataaggattctcttagtgggaagaggtagggggatgaatacccactagtttactgctgataaagagaagattcaggcacgtaatcttttctttttattacaattttttgatgaatgccttggctgcgattcattctttatatgaataaaattgctgtcaattttacgtcttgtcctgccatatcgcgaaatttctgcgcaaaagcacaaaaaatttttgcatctcccccttgatgacgtggtttacgaccccatttagtagtcaaccgcagtgagtgagtctgcaaaaaaatgaaattgggcagttgaaaccagacgtttcgcccctattacagactcacaaccacatgatgaccgaatatatagtggagacgtttagatgggtaaaataattggtatcgacctgggtactaccaactcttgtgtagcgattatggatggcaccactcctcgcgtgctggagaacgccgaaggcgatcgcaccacgccttctatcattgcctatacccaggatggtgaaactctagttggtcagccggctaaacgtcaggcagtgacgaacccgcaaaacactctgtttgcgattaaacgcctgattggtcgccgcttccaggacgaagaagtacagcgtgatgtttccatcatgccgttcaaaattattgctgctgataacggcgacgcatgggtcgaagttaaaggccagaaaatggcaccgccgcagatttctgctgaagtgctgaaaaaaatgaagaaaaccgctgaagattacctgggtgaaccggtaactgaagctgttatcaccgtaccggcatactttaacgatgctcagcgtcaggcaaccaaagacgcaggccgtatcgctggtctggaagtaaaacgtatcatcaacgaaccgaccgcagctgcgctggcttacggtctggacaaaggcactggcaaccgtactatcgcggtttatgacctgggtggtggtactttcgatatttctattatcgaaatcgacgaagttgacggcgaaaaaaccttcgaagttctggcaaccaacggtgatacccacctggggggtgaagacttcgacagccgtctgatcaactatctggttgaagaattcaagaaagatcagggcattgacctgcgcaacgatccgctggcaatgcagcgcctgaaagaagcggcagaaaaagcgaaaatcgaactgtcttccgctcagcagaccgacgttaacctgccatacatcactgcagacgcgaccggtccgaaacacatgaacatcaaagtgactcgtgcgaaactggaaagcctggttgaagatctggtaaaccgttccattgagccgctgaaagttgcactgcaggacgctggcctgtccgtatctgatatcgacgacgttatcctcgttggtggtcagactcgtatgccaatggttcagaagaaagttgctgagttctttggtaaagagccgcgtaaagacgttaacccggacgaagctgtagcaatcggtgctgctgttcagggtggtgttctgactggtgacgtaaaagacgtactgctgctggacgttaccccgctgtctctgggtatcgaaaccatgggcggtgtgatgacgacgctgatcgcgaaaaacaccactatcccgaccaagcacagccaggtgttctctaccgctgaagacaaccagtctgcggtaaccatccatgtgctgcagggtgaacgtaaacgtgcggctgataacaaatctctgggtcagttcaacctagatggtatcaacccggcaccgcgcggcatgccgcagatcgaagttaccttcgatatcgatgctgacggtatcctgcacgtttccgcgaaagataaaaacagcggtaaagagcagaagatcaccatcaaggcttcttctggtctgaacgaagatgaaatccagaaaatggtacgcgacgcagaagctaacgccgaagctgaccgtaagtttgaagagctggtacagactcgcaaccagggcgaccatctgctgcacagcacccgtaagcaggttgaagaagcaggcgacaaactgccggctgacgacaaaactgctatcgagtctgcgctgactgcactggaaactgctctgaaaggtgaagacaaagccgctatcgaagcgaaaatgcaggaactggcacaggtttcccagaaactgatggaaatcgcccagcagcaacatgcccagcagcagactgccggtgctgatgcttctgcaaacaacgcgaaagatgacgatgttgtcgacgctgaatttgaagaagtcaaagacaaaaaataatcgccctataaacgggtaattatactgacacgggcgaaggggaatttcctctccgcccgtgcattcatctaggggcaatttaaaaaagatggctaagcaagattattacgagattttaggcgtttccaaaacagcggaagagcgtgaaatcagaaaggcctacaaacgcctggccatgaaataccacccggaccgtaaccagggtgacaaagaggccgaggcgaaatttaaagagatcaaggaagcttatgaagttctgaccgacagccaaaaacgtgcggcatacgatcagtatggtcatgctgcgtttgagcaaggtggcatgggcggcggcggttttggcggcggcgcagacttcagcgatatttttggtgacgttttcggcgatatttttggcggcggacgtggtcgtcaacgtgcggcgcgcggtgctgatttacgctataacatggagctcaccctcgaagaagctgtacgtggcgtgaccaaagagatccgcattccgactctggaagagtgtgacgtttgccacggtagcggtgcaaaaccaggtacacagccgcagacttgtccgacctgtcatggttctggtcaggtgcagatgcgccagggattcttcgctgtacagcagacctgtccacactgtcagggccgcggtacgctgatcaaagatccgtgcaacaaatgtcatggtcatggtcgtgttgagcgcagcaaaacgctgtccgttaaaatcccggcaggggtggacactggagaccgcatccgtcttgcgggcgaaggtgaagcgggcgagcatggcgcaccggcaggcgatctgtacgttcaggttcaggttaaacagcacccgattttcgagcgtgaaggcaacaacctgtattgcgaagtcccgatcaacttcgctatggcggcgctgggtggcgaaatcgaagtaccgacccttgatggtcgcgtcaaactgaaagtgcctggcgaaacccagaccggtaagctattccgtatgcgcggtaaaggcgtcaagtctgtccgcggtggcgcacagggtgatttgctgtgccgcgttgtcgtcgaaacaccggtaggcctgaacgaaaggcagaaacagctgctgcaagagctgcaagaaagcttcggtggcccaaccggcgagcacaacagcccgcgcagtaagagcttctttgatggtgtgaagaagttttttgacgacctgacccgctaacctccccaaaagcctgcccgtgggcaggcctgggtaaaaatagggtgcgttgaagatatgcgagcacctgtaaagtggcggggatcactctacctcaatgtgtatcacaatatccatattctttgtgggggagtctggagattgagtagatattcttgttcagaatgtatcagccgatggttctacgattcttaagccacgaagagttcagatagtacaacggcatgtctcttttgactatctggcaaccggcagtgtgttctctcacgcatcacaaaagcagcaggcataaaaaaacccgcttgcgcgggctttttcacaaagcttcagcaaattggcgattaagccagtttgttgatctgtgcagtcaggttagccttatgacgtgcagctttgtttttgtggatcagacctttagcagcctgacggtccacgatcggttgcatttcgttaaatgctttctgtgcagcagctttgtcgccagcttcgatagctgcgtatactttcttgatgaaagtacgcatcatagagcgacggcttgcgttgtgcttacgagccttttcagactgaatggcgcgcttcttagcacttttgatattagccaaggtccaactcccaaatgtgttctatatggacaattcaaaggccgaggaatatgcccttttagccttcttttgtcaatggatttgtgcaaataagcgccgttaatgtgccggcacagcttacgtagtgatggcgcaggattctaccagcttgcggggtgtgaatacagcttttccgcgataaaaattgcagcaggcggtcagtttcttcccgtgatttgcgccatggcaatgaaaagccacttctttctgattagcgtactcaatcgccggttaaccttgaccgctgtacaaggtatactcggacgatttagcctgttttgagccagacatgaagctgatacgcggcatacataatctcagccaggccccgcaagaagggtgtgtgctgactattggtaatttcgacggcgtgcatcgcggtcatcgcgcgctgttacagggcttgcaggaagaagggcgcaagcgcaacttaccggtgatggtgatgctttttgaacctcaaccactggaactgtttgctaccgataaagccccggcaagactgacccggctgcgggaaaaactgcgttaccttgcagagtgtggcgttgattacgtgctgtgcgtgcgtttcgacaggcgtttcgcggcgttaaccgcgcaaaatttcatcagcgatcttctggtgaagcatttgcgcgtaaaatttcttgccgtaggtgatgatttccgctttggcgctggtcgtgaaggcgatttcttgttattacagaaagctggcatggaatacggcttcgatatcaccagtacgcaaactttttgcgaaggtggcgtgcgcatcagcagcaccgccgtgcgtcaggcccttgcggatgacaatctggctctggcagagagtttactggggcacccgtttgccatctccgggcgtgtagtccacggtgatgaattagggcgcactataggtttcccgacggcgaatgtaccgctgcgccgtcaggtttccccggtgaaaggggtttatgcggtagaagtgctgggcctcggtgaaaagccgttacccggcgtggcaaacatcggaacacgcccaacggttgccggtattcgccagcagctggaagtgcatttgttagatgttgcaatggacctttacggtcgccatatacaagtagtgctgcgtaaaaaaatacgcaatgagcagcgatttgcgagcctggacgaactgaaagcgcagattgcgcgtgatgaattaaccgcccgcgaattttttgggctaacaaaaccggcttaagcctgttatgtaatcaaaccgaaatacggaaccgagaatctgatgagtgactataaaagtaccctgaatttgccggaaacagggttcccgatgcgtggcgatctcgccaagcgcgaacccggaatgctggcgcgttggactgatgatgatctgtacggcatcatccgtgcggctaaaaaaggcaaaaaaaccttcattctgcatgatggccctccttatgcgaatggcagcattcatattggtcacagcgttaacaagattctgaaagacattatcgtgaagtccaaagggctttccggttatgacagcccgtatgtgcctggctgggactgccacggtctgccgatcgagctgaaagtcgagcaagaatacggtaagccgggtgagaaattcaccgccgccgagttccgcgccaagtgccgcgaatacgcggcgacccaggttgacggtcaacgcaaagactttatccgtctgggcgtgctgggcgactggagccacccgtacctgaccatggacttcaaaactgaagccaacatcatccgcgcgctgggcaaaatcatcggcaacggtcacctgcacaaaggcgcgaagccagttcactggtgcgttgactgccgttctgcgctggcggaagcggaagttgagtattacgacaaaacttctccgtccatcgacgttgctttccaggcagtcgatcaggatgcactgaaagcaaaatttgccgtaagcaacgttaacggcccaatcagcctggtaatctggaccaccacgccgtggactctgcctgccaaccgcgcaatctctattgcaccagatttcgactatgcgctggtgcagatcgacggtcaggccgtgattctggcgaaagatctggttgaaagcgtaatgcagcgtatcggcgtgaccgattacaccattctcggcacggtaaaaggtgcggagcttgagctgctgcgctttacccatccgtttatgggcttcgacgttccggcaatcctcggcgatcacgttaccctggatgccggtaccggtgccgttcacaccgcgcctggccacggcccggacgactatgtgatcggtcagaaatacggcctggaaaccgctaacccggttggcccggacggcacttatctgccgggcacttatccgacgctggatggcgtgaacgtcttcaaagcgaacgacatcgtcgttgcgctgctgcaggaaaaaggcgcgctgctgcacgttgagaaaatgcagcacagctatccgtgctgctggcgtcacaaaacgccgatcatcttccgcgcgacgccgcagtggttcgtcagcatggatcagaaaggtctgcgtgcgcagagtctgaaagagatcaaaggcgtgcagtggatcccggactggggccaggcgcgtatcgagagcatggttgctaaccgtcctgactggtgtatctcccgtcagcgcacctggggtgtaccgatgagtctgttcgtgcacaaagacacggaagagctgcatccgcgtacccttgaactgatggaagaagtggcaaaacgcgttgaagtcgatggcatccaggcgtggtgggatctcgatgcgaaagagatcctcggcgacgaagctgatcagtacgtgaaagtgccggacacattggatgtatggtttgactccggatctacccactcttctgttgttgacgtgcgtccggaatttgccggtcacgcagcggacatgtatctggaaggttctgaccaacaccgcggctggttcatgtcttccctaatgatctccaccgcgatgaagggtaaagcgccgtatcgtcaggtactgacccacggctttaccgtggatggtcagggccgcaagatgtctaaatccatcggcaataccgttagcccgcaggatgtgatgaacaaactgggcgcggatattctgcgtctgtgggtggcaagtaccgactacaccggtgaaatggccgtttctgacgagatcctgaaacgtgctgccgatagctatcgtcgtatccgtaacaccgcgcgcttcctgctggcaaacctgaacggttttgatccagcaaaagatatggtgaaaccggaagagatggtggtactggatcgctgggccgtaggttgtgcgaaagcggcacaggaagacatcctcaaggcgtacgaagcatacgatttccacgaagtggtacagcgtctgatgcgcttctgctccgttgagatgggttccttctacctcgacatcatcaaagaccgtcagtacaccgccaaagcggacagtgtggcgcgtcgtagctgccagactgcgctatatcacatcgcagaagcgctggtgcgctggatggcaccaatcctctccttcaccgctgatgaagtgtggggctacctgccgggcgaacgtgaaaaatacgtcttcaccggtgagtggtacgaaggcctgtttggcctggcagacagtgaagcgatgaacgatgcgttctgggacgagctgttgaaagtgcgtggcgaagtgaacaaagtcattgagcaagcgcgtgccgacaagaaagtgggtggcagcctggaagcggcagtaaccttgtatgcagaaccggaactgagcgcgaaactgaccgcgctgggcgatgaattacgatttgtcctgttgacctccggcgctaccgttgcagactataacgacgcacctgctgatgctcagcagagcgaagtactcaaagggctgaaagtcgcgttgagtaaagccgaaggtgagaagtgcccacgctgctggcactacacccaggatgtcggcaaggtggcggaacacgcagaaatctgcggccgctgtgtcagcaacgtcgccggtgacggtgaaaaacgtaagtttgcctgatgagtcaaagcatctgtagtacagggctacgctggctgtggctggtggtagtcgtgctgattatcgatctgggcagcaaatacctgatcctccagaactttgctctgggggatacggtcccgctgttcccgagccttaatctgcattatgcgcgtaactatggcgcggcgtttagtttccttgccgatagcggcggctggcagcgttggttctttgccggtattgcgattggtattagcgtgatcctggcagtgatgatgtatcgcagcaaggccacgcagaagctaaacaatatcgcttacgcgctgattattggcggcgcgctgggcaacctgttcgaccgcctgtggcacggcttcgttgtcgatatgatcgacttctacgtcggcgactggcacttcgccaccttcaaccttgccgatactgccatctgtgtcggtgcggcactgattgtgctggaaggttttttgccttctagagcgaaaaaacaataataaaccctgccggatgcgatgctgacgcatcttatccggcctacagattgctgcgaaatcgtaggccggataaggcgtttacgccgcatccggcaaaaatccttaaatataagagcaaacctgcatgtctgaatctgtacagagcaatagcgccgtcctggtgcacttcacgctaaaactcgacgatggcaccaccgccgagtctacccgcaacaacggtaaaccggcgctgttccgcctgggtgatgcttctctttctgaagggctggagcaacacctgttggggctgaaagtgggcgataaaaccaccttcagcttggagccagatgcggcgtttggcgtgccgagtccggacctgattcagtacttctcccgccgtgaatttatggatgcaggcgagccagaaattggcgcaatcatgctttttaccgcaatggatggcagtgagatgcctggcgtgatccgcgaaattaacggcgactccattaccgttgatttcaaccatccgctggccgggcagaccgttcattttgatattgaagtgctggaaatcgatccggcactggaggcgtaacatgcagatcctgttggccaacccgcgtggtttttgtgccggggtagaccgcgctatcagcattgttgaaaacgcgctggccatttacggcgcaccgatatatgtccgtcacgaagtggtacataaccgctatgtggtcgatagcttgcgtgagcgtggggctatctttattgagcagattagcgaagtaccggacggcgcgatcctgattttctccgcacacggtgtttctcaggcggtacgtaacgaagcaaaaagtcgcgatttgacggtgtttgatgccacctgtccgctggtgaccaaagtgcatatggaagtcgcccgcgccagtcgccgtggcgaagaatctattctcatcggtcacgccgggcacccggaagtggaagggacaatgggccagtacagtaacccggaagggggaatgtatctggtcgaaagcccggacgatgtgtggaaactgacggtcaaaaacgaagagaagctctcctttatgacccagaccacgctgagcgtggatgacacgtctgatgtgatcgacgcgctgcgtaaacgcttcccgaaaattgtcggtccgcgcaaagatgacatctgctacgccacgactaaccgtcaggaagcggtacgcgccctggcagaacaggcggaagttgtgttggtggtcggtagcaaaaactcctccaactccaaccgtctggcggagctggcccagcgtatgggcaaacgcgcgtttttgattgacgatgcgaaagacatccaggaagagtgggtgaaagaggttaaatgcgtcggcgtgactgcgggcgcaagcgctccggatattctggtgcagaatgtggtggcacgtttgcagcagctgggcggtggtgaagccattccgctggaaggccgtgaagaaaacattgttttcgaagtgccgaaagagctgcgtgtcgatattcgtgaagtcgattaagtcattagcagcctaagttatgcgaaaatgccggtcttgttaccggcattttttatggagaaaacatgcgtttacctatcttcctcgatactgaccccggcattgacgatgccgtcgccattgccgccgcgatttttgcacccgaactcgacctgcaactgatgaccaccgtcgcgggtaatgtcagcgttgagaaaactacccgcaatgccctgcaactgctgcatttctggaatgcggagattccgctcgcccaaggggccgctgtgccactggtacgcgcaccgcgtgatgcggcatctgtgcacggcgaaagcggaatggctggctacgactttgttgagcacaaccgaaagccgctcgggataccggcgtttctggcgattcgggatgccctgatgcgtgcaccagagcctgttaccctggtggccatcggcccgttaaccaatattgcgctgttacttagtcaatgcccggaatgcaagccgtatattcgccgtctggtgatcatgggtggttctgccggacgcggcaactgtacgccaaacgccgagtttaatattgctgccgatccagaagctgctgcctgtgtcttccgcagtggtattgaaatcgtcatgtgcggtttggatgtcaccaatcaggcaatattaactcctgactatctctctacactgccgcagttaaaccgtaccgggaaaatgcttcacgccctgtttagccactaccgtagcggcagtatgcaaagcggcttgcgaatgcacgatctctgcgccatcgcctggctggtgcgcccggacctgttcactctcaaaccctgttttgtggcagtggaaactcagggcgaatttaccagtggcacgacggtggttgatatcgacggttgcctgggcaagccagccaatgtacaggtggcattggatctggatgtgaaaggcttccagcagtgggtggctgaggtgctggctctggcgagctaacctgtcacatgttattggcatgcagtcattcatcgactcatgcctttcactgatatccctccctgtttatcattaatttctaattatcagcgtttttggctggcggcgtagcgatgcgctggttactctgaaaacggtctatgcaaattaacaaaagagaatagctatgcatgatgcaaacatccgcgttgccatcgcgggagccggggggcgtatgggccgccagttgattcaggcggcgctggcattagagggcgtgcagttgggcgctgcgctggagcgtgaaggatcttctttactgggcagcgacgccggtgagctggccggagccgggaaaacaggcgttaccgtgcaaagcagcctcgatgcggtaaaagatgattttgatgtgtttatcgattttacccgtccggaaggtacgctgaaccatctcgctttttgtcgccagcatggcaaagggatggtgatcggcactacggggtttgacgaagccggtaaacaagcaattcgtgacgccgctgccgatattgcgattgtctttgctgccaattttagcgttggcgttaacgtcatgcttaagctgctggagaaagcagccaaagtgatgggtgactacaccgatatcgaaattattgaagcacatcatagacataaagttgatgcgccgagtggcaccgcactggcaatgggagaggcgatcgcccacgcccttgataaagatctgaaagattgcgcggtctacagtcgtgaaggccacaccggtgaacgtgtgcctggcaccattggttttgccaccgtgcgtgcaggtgacatcgttggtgaacataccgcgatgtttgccgatattggcgagcgtctggagatcacccataaggcgtccagccgtatgacatttgctaacggcgcggtaagaagcgctttgtggttgagtggtaaggaaagcggtctttttgatatgcgagatgtacttgatctcaataatttgtaaccacaaaatatttgttatggtgcaaaaataacacatttaatttattgattataaagggctttaatttttggcccttttatttttggtgttatgtttttaaattgtctataagtgccaaaaattacatgttttgtcttctgtttttgttgttttaatgtaaattttgaccatttggtccacttttttctgctcgtttttatttcatgcaatcttcttgctgcgcaagcgttttccagaacaggttagatgatctttttgtcgcttaatgcctgtaaaacatgcatgagccacaaaataatataaaaaatcccgccattaagttgacttttagcgcccatatctccagaatgccgccgtttgccagaaattcgtcggtaagcagatttgcattgatttacgtcatcattgtgaattaatatgcaaataaagtgagtgaatattctctggagggtgttttgattaagagtgcgctattggttctggaagacggaacccagtttcacggtcgggccataggggcaacaggtagcgcggttggggaagtcgttttcaatactagtatgaccggttatcaagaaatcctcactgatccttcctattctcgtcaaatcgttactcttacttatccccatattggcaatgtcggcaccaatgacgccgatgaagaatcttctcaggtacatgcacaaggtctggtgattcgcgacctgccgctgattgccagcaacttccgtaataccgaagacctctcttcttacctgaaacgccataacatcgtggcgattgccgatatcgatacccgtaagctgacgcgtttactgcgcgagaaaggcgcacagaatggctgcattatcgcgggcgataacccggatgcggcgctggcgttagaaaaagcccgcgcgttcccaggtctgaatggcatggatctggcaaaagaagtgaccaccgcagaagcctatagctggacacaagggagctggacgttgaccggtggcctgccagaagcgaaaaaagaagacgagctgccgttccacgtcgtggcttatgattttggtgccaagcgcaacatcctgcggatgctggtggatagaggctgtcgcctgaccatcgttccggcgcaaacttctgcggaagatgtgctgaaaatgaatccagacggcatcttcctctccaacggtcctggcgacccggccccgtgcgattacgccattaccgccatccagaaattcctcgaaaccgatattccggtattcggcatctgtctcggtcatcagctgctggcgctggcgagcggtgcgaagactgtcaaaatgaaatttggtcaccacggcggcaaccatccggttaaagatgtggagaaaaacgtggtaatgatcaccgcccagaaccacggttttgcggtggacgaagcaacattacctgcaaacctgcgtgtcacgcataaatccctgttcgacggtacgttacagggcattcatcgcaccgataaaccggcattcagcttccaggggcaccctgaagccagccctggtccacacgacgccgcgccgttgttcgaccactttatcgagttaattgagcagtaccgtaaaaccgctaagtaatcaggagtaaaagagccatgccaaaacgtacagatataaaaagtatcctgattctgggtgcgggcccgattgttatcggtcaggcgtgtgagtttgactactctggcgcgcaagcgtgtaaagccctgcgtgaagagggttaccgcgtcattctggtgaactccaacccggcgaccatcatgaccgacccggaaatggctgatgcaacctacatcgagccgattcactgggaagttgtacgcaagattattgaaaaagagcgcccggacgcggtgctgccaacgatgggcggtcagacggcgctgaactgcgcgctggagctggaacgtcagggcgtgttggaagagttcggtgtcaccatgattggtgccactgccgatgcgattgataaagcagaagaccgccgtcgtttcgacgtagcgatgaagaaaattggtctggaaaccgcgcgttccggtatcgcacacacgatggaagaagcgctggcggttgccgctgacgtgggcttcccgtgcattattcgcccatcctttaccatgggcggtagcggcggcggtatcgcttataaccgtgaagagtttgaagaaatttgcgcccgcggtctggatctctctccgaccaaagagttgctgattgatgagagcctgatcggctggaaagagtacgagatggaagtggtgcgtgataaaaacgacaactgcatcatcgtctgctctatcgaaaacttcgatgcgatgggcatccacaccggtgactccatcactgtcgcgccagcccaaacgctgaccgacaaagaatatcaaatcatgcgtaacgccagcatggcggtgctgcgtgaaatcggcgttgaaaccggtggttccaacgttcagtttgcggtgaacccgaaaaacggtcgtctgattgttatcgaaatgaacccacgcgtgtcccgttctagcgcgctggcgagcaaagcgaccggtttcccgattgctaaagtggcggcgaaactggcggtgggttacaccctcgacgaactgatgaacgacatcactggcggacgtactccggcctccttcgagccgtccatcgactatgtggttactaaaattcctcgcttcaacttcgaaaaattcgccggtgctaacgaccgtctgaccactcagatgaaaagcgttggcgaagtgatggcgattggtcgcacgcagcaggaatccctgcaaaaagcgctgcgcggcctggaagtcggtgcgactggattcgacccgaaagtgagcctggatgacccggaagcgttaaccaaaatccgtcgcgaactgaaagacgcaggcgcagatcgtatctggtacatcgccgatgcgttccgtgcgggcctgtctgtggacggcgtcttcaacctgaccaacattgaccgctggttcctggtacagattgaagagctggtgcgtctggaagagaaagtggcggaagtgggcatcactggcctgaacgctgacttcctgcgccagctgaaacgcaaaggctttgccgatgcgcgcttggcaaaactggcgggcgtacgcgaagcggaaatccgtaagctgcgtgaccagtatgacctgcacccggtttataagcgcgtggatacctgtgcggcagagttcgccaccgacaccgcttacatgtactccacttatgaagaagagtgcgaagcgaatccgtctaccgaccgtgaaaaaatcatggtgcttggcggcggcccgaaccgtatcggtcagggtatcgaattcgactactgttgcgtacacgccagcctggcgctgcgcgaagacggttacgaaaccattatggttaactgtaacccggaaaccgtctccaccgactacgacacttccgaccgcctctacttcgagccggtaactctggaagatgtgctggaaatcgtgcgtatcgagaagccgaaaggcgttatcgtccagtacggcggtcagaccccgctgaaactggcgcgcgcgctggaagctgctggcgtaccggttatcggcaccagcccggatgctatcgaccgtgcagaagaccgtgaacgcttccagcatgcggttgagcgtctgaaactgaaacaaccggcgaacgccaccgttaccgctattgaaatggcggtagagaaggcgaaagagattggctacccgctggtggtacgtccgtcttacgttctcggcggtcgggcgatggaaatcgtctatgacgaagctgacctgcgtcgctacttccagacggcggtcagcgtgtctaacgatgcgccagtgttgctggaccacttcctcgatgacgcggtagaagttgacgtggatgccatctgcgacggcgaaatggtgctgattggcggcatcatggagcatattgagcaggcgggcgtgcactccggtgactccgcatgttctctgccagcctacaccttaagtcaggaaattcaggatgtgatgcgccagcaggtgcagaaactggccttcgaattgcaggtgcgcggcctgatgaacgtgcagtttgcggtgaaaaacaacgaagtctacctgattgaagttaacccgcgtgcggcgcgtaccgttccgttcgtctccaaagccaccggcgtaccgctggcaaaagtggcggcgcgcgtgatggctggcaaaagcctggctgagcagggcgtaaccaaagaagttatcccgccgtactacagcgtgaaagaagtggtgctgccgttcaataaattcccgggcgttgacccgctgttagggccagaaatgcgctctaccggggaagtcatgggcgtgggccgcaccttcgctgaagcgtttgccaaagcgcagctgggcagcaactccaccatgaagaaacacggtcgtgcgctgctttccgtgcgcgaaggcgataaagaacgcgtggtggacctggcggcaaaactgctgaaacagggcttcgagctggatgcgacccacggcacggcgattgtgctgggcgaagcaggtatcaacccgcgtctggtaaacaaggtgcatgaaggccgtccgcacattcaggaccgtatcaagaatggcgaatatacctacatcatcaacaccaccagtggccgtcgtgcgattgaagactcccgcgtgattcgtcgcagtgcgctgcaatataaagtgcattacgacaccaccctgaacggcggctttgccaccgcgatggcgctgaatgccgatgcgactgaaaaagtaattagcgtgcaggaaatgcacgcacagatcaaataatagcgtgtcatggcagatatttttcatccgctaatttgatcgaataactaatacggttctctgatgaggaccgtttttttttgcccattaagtaaatcttttggggaatcgatatttttgatgacataagcaggatttagctcacacttatcgacggtgaagttgcatactatcgatatatccacaattttaatatggccttgtttaattgcttcaaaacgagtcatagccagacttttaatttgtgaaactggagttcgtatgtgtgaaggatatgttgaaaaaccactctacttgttaatcgccgaatggatgatggctgaaaatcggtgggtgatagcaagagagatctctattcatttcgatattgaacacagcaaggcggttaataccctgacttatattctgagcgaagtcacagaaataagctgcgaagttaagatgatccctaataagctggaagggcggggatgccagtgtcagcgactggttaaagtggtcgatatcgatgagcaaatttacgcgcgcctgcgcaataacagtcgggaaaaattagtcggtgtaagaaagacgccgcgtattcctgccgttccgctcacggaacttaaccgcgagcagaagtggcagatgatgttgagtaagagtatgcgtcgttaattttatctcgttgataccgggcgtcctgcttgccagatgcgatgttgtagcatcttatccagcaaccaggtcgcatccggcaagatcaccgtttaggcgtcacatccgtcgtcccctgcaaacgggggcgattttcctccatttgcctcagtggctgcgtttcatgtaagcttacatgacagcgcccgacaagatcctgatactctttggtattcaaccgtttccagtgtaactcgtcgtcactaacattgcgtacagcgcgggctggcgtacccatcaacaactggcgtttctcgccgcgaaagcccgctttgacaaagctcatggcggcaacaatgctctcttcgccaatgaccgcgccatccataatcacgctgttcatcccgaccaatgcatcgcgaccaatcaaacaaccatgcaggatcgctccgtgcccgatatggccgttttccccaacgatagtgtcagtgtcgcagtagccatgcataatgcagccatcctgaatattggctcccgcttgcacgatcaaccgcccgtagtcaccacgcagactggcgagtgggccgatgtagacaccggctcccacaatcacatcgccaatcaagacggcactgggatggacaaacgccgtcgggtgaaccaccggaattaacccctcaaaggcgtaatagctcacggttgttaacgtcctttccacaccggatcgcgcttctcggcaaacgccagcggcccttcaatggcatcttcgctatgcagaacgcttggatagtgtttcaacacgccgctgcgaatatagcgatacgcttcttctaccggcatttcgctggtggtgcggtagatctctttcagcgccgcaatcgccagcggggcgctgttaaccagctgctgagccagttcgcgggcgttatccatcagttccgcctggctaaccacgcggttgactatcccccaacgcagcgcctcttctgcgcccattcgtctgccggtcatcaccatttcattgacgatggcaggcggcaggatcttcggcagacgcagcacaccgccgctgtcaggaacgatgcccagtttggcttccggcagggcgaagctggcgttatcggcacaaacaataaaatctgccgccagcgccagttcaaagccgccgccaaaggcatagccgttcacagctgcgataaccggtttgtcgagattgaaaatttcggttaatcccgcaaaaccacccggaccaaagtcagcatccggtgcttcgccttctgctgccgcttttaaatcccagcccgcggaaaagaacttctctccggcaccggtaataatggcgacacgtaattgcggatcgtcacggaaatttagaaatacttcgcccatttcaaagctggtttttgcatcaatagcattcgcttttggacgatcaagggtaatttccagaatacttccattgcgggtcagatgtaaactttcactcattccttttctccatttttgctttttcagggagctcaacatccctgcaaaaaatgcatattgttttagagtgtgattattagctggcagggtagttccctgctgtttcatttatttcagattctttctaattattttcccgctgcaattacgtggcagatcttttctgatctccagataagagggcactttaaatttcgccatattttgttcgcagaagcggaaaaattcctcttcgctcaatgtttcaccttcattcagcaccacaaatgctttgatggcttcatcgcgaatgctatctttaatacccacaaccacgatgtcctgaattttcgggtgcgcggcgataatattttccagctccacgcaggagacattctcgccgccacgtttaatcatattgcagcggcgatcgacgaaataaaaaaagtcctcttcgtcgcggtatccggtatcgccggtatgcagccagccatcggcttccagcactttcgcagtggcttgtgggttgagaaagtactctttgaagatggttttcccaggtatgcctttaatgcagatttcaccgatctcaccagccgggagcgggcgattgtgatcgtcgcggatctccgcttcgtagcaaaaccccacccgaccaatgctcggccagcgtcgtttatcgccaggacgatcgccgataatgcccacaatggtttccgtcatcccataagacgtcagcaagcgaacgccgaagcgttcacaaaacgcatctttttcctgctcgctcaagttgagataaaacatcacttcccgcaggcggtgttgctgatcgttcgcactaggcggctgtaccatcaacgtacggatcatcatcggaatacattcggtaacggtggcgcggtacttctgtacctgtccccagaaggcgcgggcgctgtatttctcgaccagcacaaaggtggccccggcagaaaacgccgccatcgccgcagtacactggcaatcgatatgaaacgcaggcattaccgtcaggtagacgtcatcgtcacgcagtgcacactgccaggcggagtaatatccagcgaagcgcaggttgtaatgggtaatcaccacacctttcggtcgggaggtggtgccggaggtgaagagaatttccgccgtatcgtcagtgcttagcggcggtgcatagcacaaggtggcaggttgttgatttttcagttgagtaaagctactcacgccatcatcagcgggaagtgccacatctgtcaggcaaatgtgccgcaattgagtggcatcttcctgctgaatctgttgatacataggatagaattgcgcactggtcaccagcaggcacgcctggctattttgcaggatccacgcgctttcctcgcacaacaggcgggcgttaatcggcaccataatcgcgccaatttttgccagcccgaaccagcaaaagataaattccgggcagttgtcgagatgtagtgcaaccttgtcgcctttgcgaatccccagcgtataaaacaggtttgccgtgcggttaatctcctgatttaactcaagataactataccggttaacgactccgccgctggattcacaaatcagcgccgttttatgaccgtaaacgtccgcaagatcgtcccacatttgacgtagatgttgtccgccaatgatatccattgcacctctatccatttttgttcgtttgttattgggcgggcgctagtcaggcaagccgactgacgccacgcgtttagtcctcaactttggccagacctttgctgaccaactcctgaatgtcgttttcgctgtagccgatatttttcaaaatggcagccgtgtccataccatgactgggcattccgcgccagatttgtccggggttatttttgaatttcggcatgatgttcggccctttgcaggtgcgaccatccatcgtttgccactgagtgatactttcgcgagccacatactgtggattgctttccagttccggtacggtcagcactttggcgcaggcgatattcagttcagcaaagcgttcttttacttccgcgatggtatgtgtcgccagccaggcatcgagtttctcttcaaccagtgggccgtaagggcattcgatacggtggataagctgagtgccttccgggatttctggcgtgccaagcagatgtgcgaggccaatatctttaaagcactcttcaatttgggtaatgcccaccagttccatcacgatgtagccgtcggcacatttatacagaccgcaaccggcgtagtagggatctttacctttgctcatgcgcgggcacatttcgccgccgttgaagtaatccatcatgaagtactggcccatacgcagcatcacttcatacatggcgatgtcgatactttcgcctttaccggtttcacgcactttatgcagtgctgccagcgccgccgtggtggcggtcaggccagaaaagtaatcggcggtatacgggaaggcaggcattggctggtcaacatcaccgttctgaatcaggtaaccactaaaggcctgggcgatagtgttataggccggaagattggtgtactcctcggtgccgtactgaccaaaaccggacaggtgagcgataaccagtttcgggttgtgctgccacagtacttcatcggtaatgccacgacgggcaaaggccggacctttactggcttcgatgaagatatcggtggtttccattaatttcagaaacgcttcgcggccttcatctttgaaaatatttaagctcagcgcgtgcaaattgcggcgggagagttgcgggtagttcggttgaacgcgaatggtgtcggcccaggcgacgttctcgatccagataacttccgcgccccattctgcgaacatttgcccggcaaacggtccggcgatttcgataccggagaagacaacgcgcaatccggccaacggcccgaatttcggcatgggtagatgatccattatttgctcctgaaaaatttatgtagcgcatgactgccggatgcggcgtaaacgctttatccggcctacattcgtgctcccgtaggcctgataagacgcatcagcgtcgcatcaggcagcgcacggacttagcggtattgcttcagcaccgcacgacccagcgtcaggatctgcatttcgtcagatcccccggagacgcggtctacacgcagatcacgccagaagcggctgatgcggtggttgcccgcaatcccgacaccgcccagcacctgcattgcgctatccacaacttcaaatgccgcattggcgcagaagtatttgcacatcgctgcatcgccagaggtgatggtgccgttgtctgctttccacgctgcttcatacagcatgtttttcatggagtttaatttgatcgccatgtgggcgaatttttcctgaatcaactggaaacgaccaatagcctcgccaaactgcacgcgctgattggcgtagcgcgccgcatcttcaaaggcgcacatcgccgtaccgtagttggtgagggctaccaggaaacgttcatggtcgaactcttctttgacgcggttaaagccgttaccttcccgaccgaacatgtctttctcgtccagttccacgtcgtcaaaggtgatttcacagcagctatccatacgcagaccgagcttttcaagtttggtcactttgatgcccggtttgctcatatcaacaaaccattcggtgtagacaggtttgtccggagaagccccgtcgcgcgccatcaccacgatgtacggggtgtaggcgctgctggtaataaaacacttactaccattaagataaatcttaccatttctacgggtataagtcgttttcaggctacccacgtcggagcccgcgcccggttcggtaatcgcactgttccacatctgcttaccggtgccgcggaaagccataattttgtcgatctgctcttgtgtgccttcgcgcaggaaggtgttgaacccgcccggcaactggtacagcacataggttggtgcccccagacgtcccagctccatccacacggcggcgagagtaacaaaccccgcgtccagaccaccgtgctcttcagggatcagcagactgtcgatacccatatccgccagtgctttgacaaaacgttccgggtagacgctgtcacggtcgcactcggcaaaataggcctcccagttttcgctggccatcagttcgcggataccggcgacaaacagttcctgctcatcatttaaattaaaatccatctttcaacctcttgatattttgggggttaattaatctttccagttctgtttcgcgtctttaataaaggagagcgtcaccataatgttgacgaagaacagcgggcatcctccggcgataatggcggtttgaatcggtttcaggccgccgagcgccagcagaacaataccgataatgccaaccagaatactccaaccgatacgcaccagcagaggtggttcttcaccatcgcgtacttcgcggcaagtggacatcgccagggtataagagcaggcgttaaccagcgtaacggtggcaataaagcagaggatgaagaagccccacatggtggcggtgctgagtggcagagcggcccaggtttcaatgatggcgcgcgccacaccgtactgttcgatcagatttggaatgttgatgatgtttttatctatcaacagcagagtgttactaccgagtacagtccacaggatccaggtactcgctgtcagccccagcaccatgccgaagcacagttcacgcacagtacgaccacgggagatgcgggcgaggaagatactcatctggatagcataaatcacccaccatgcccagtagaacacggtccagccctgcgggaagccgcctttagcgatgggatcggtatagaacaacatgcgcggcagatacatcagcaacatccccacgctatcggtgaagtagttcatgatgaagctggcaccgctgacaatgaacacccaacccagcatcaggaagctcaggtaactacgcacgtcactggcgatacgtacccctttttgcagaccgcaagcgacgcaaatggcgttgaggataatccagcaggtaatgatgatagcgtccagttgcagggtatgcggaatgccaaacaaccattgcatacactcggtcaccagcggcgtggcaaggcccagactggtacccatcgcgaagatcaaggcgacgagatagaagttgtcgacgatagtgccgaacaaccctttggcgtgtttttcacctaccagcggcaccagtgtgctgctggggcgaatcacttccattttgcggacaaagaagaagtaagcgaaggcgacactaaggaagctgtaagtggcccacggcagaggtccccagtggaacaagctgtaagccagccccaactctttcgcccctgtgctgttcggttctaagccaaacggcggggtggagatgtagtagtagatctcaatgcttccccagaacagtacggcagcagacgtacaggaggcgaacatcataaagatccaactggcggtgctaaattctggcggttcgttacctaaacgctttttggcatacgggccaaacaccagccagaaccaaccgaaaagcatcaccaccatataccattcaaatgcccatccccatacattggtgacgtaactgaatacagcattaataacgacattcgctgcatccagatctctgactgtaagccaacaaagtatgccgacgattattaacggcggaaagaaaaccttcggttctattcccgtttttctcttttcattcttcatgagttaattccactgtgaaaacgaatatttattttgcgttcccgtttgttttatttttgttaacatttaatataattattattaacctcgtggacgcgttaatggctaactcataatgggtattcaataagctgtattctgtgattggtatcacatttttgtttcgggtgaatagagggcgttttttcgttaattttgattaataatcagtttgttatgctctgttgtgagtaaaaaataacatctgactttcaatattggtgatccataaaacaatattgaaaatttctttttgctacgccgtgttttcaatattggtgaggaacttaacaatattgaaagttggatttatctgcgtgtgacattttcaatattggtgattaaagttttatttcaaaattaaagggcgtgatatctgtaattaacaccaccgatatgaacgacgtttccttcatgatttctggagatgcaatgaagattattacttgctataagtgcgtgcctgatgaacaggatattgcggtcaataatgctgatggtagtttagacttcagcaaagccgatgccaaaataagccaatacgatctcaacgctattgaagcggcttgccagctaaagcaacaggcagcagaggcgcaggtgacagccttaagtgtgggcggtaaagccctgaccaacgccaaagggcgtaaagatgtgctaagccgcggcccggatgaactgattgtggtgattgatgaccagttcgagcaggcactgccgcaacaaacggcgagcgcactggctgcagccgcccagaaagcaggctttgatctgatcctctgtggcgatggttcttccgacctttatgcccagcaggttggtctgctggtgggcgaaatcctcaatattccggcagttaacggcgtcagcaaaattatctccctgacggcagataccctcaccgttgagcgcgaactggaagatgaaaccgaaaccttaagcattccgctgcctgcggttgttgctgtttccactgatatcaactccccacaaattcctagcatgaaagccattctcggcgcggcgaaaaagcccgtccaggtatggagcgcggcggatattggttttaacgcagaggcagcctggagtgaacaacaggttgccgcgccgaaacagcgcgaacgtcagcgcatcgtgattgaaggcgacggcgaagaacagatcgccgcatttgctgaaaatcttcgcaaagtcatttaattacaggggatgctatgaacacgttttctcaagtctgggtattcagcgataccccttctcgtctgccggaactgatgaacggtgcgcaggctttagctaatcaaatcaacacctttgtcctcaatgatgccgacggcgcacaggcaatccagctcggcgctaatcatgtctggaaattaaacggcaaaccggacgatcggatgatcgaagattacgccggtgtcatggctgacactattcgccagcacggcgcagacggcctggtgctgctgccaaacacccgtcgcggcaaattactggcggcaaaactgggttatcgccttaaagcggcggtgtctaacgatgccagcaccgtcagcgtacaggacggtaaagcgacagtgaaacacatggtttacggtggtctggcgattggcgaagaacgcattgccacgccgtatgcggtactgaccatcagcagcggcacgttcgatgcggctcagccagacgcgagtcgcactggcgaaacgcacaccgtggagtggcaggctccggctgtggcgattacccgcacggcaacccaggcgcgccagagcaacagcgtcgatctcgacaaagcccgtctggtggtcagcgtcggtcgcggtattggcagcaaagagaacattgcgctggcagaacagctttgcaaggcgataggtgcggagttggcctgttctcgtccggtggcggaaaacgaaaaatggatggagcacgaacgctatgtcggtatctccaacctgatgctgaaacctgaactgtacctggcggtggggatctccgggcagatccagcacatggttggcgctaacgcgagccaaaccattttcgccatcaataaagataaaaatgcgccgatcttccagtacgcggattacggcattgttggcgacgccgtgaagatccttccggcgctgaccgcagctttagcgcgttgatccactctggcagggctgcattttggccctgccgctgacagggagctcttatgtccgaagatatctttgacgccatcatcgtcggtgcagggcttgccggtagcgttgccgcactggtgctcgcccgcgaaggtgcgcaagtgttagttatcgagcgtggcaattccgcaggtgccaagaacgtcaccggcgggcgtctctatgcccacagtctggaacacattattcctggtttcgccgactccgcccccgtagaacgcctgatcacccatgaaaaactcgcgtttatgacggaaaagagtgcgatgactatggactactgcaatggtgacgaaaccagcccatcccagcgttcttactccgttttgcgcagtaaatttgatgcctggctgatggagcaggccgaagaagcgggcgcgcagttaattaccgggatccgcgtcgataacctcgtacagcgcgatggcaaagtcgtcggtgtagaagccgatggcgatgtgattgaagcgaaaacggtgatccttgctgatggggtgaactccatccttgccgaaaaattggggatggcaaaacgcgtcaaaccgacggatgtggcggttggcgtgaaggaactgatcgagttaccgaagagcgttattgaagaccgttttcagttgcagggtaatcagggggcggcttgcctgtttgcgggaagtcccaccgatggcctgatgggcggcggcttcctttataccaatgaaaacaccctgagcctggggctggtttgtggtttgcatcatctgcatgacgcgaaaaaaagcgtgccgcaaatgctggaagatttcaaacagcatccggccgttgcaccgctgatcgcgggcggcaagctggtggaatattccgctcacgtagtgccggaagcaggcatcaacatgctgccggagttggttggtgacggcgtattgattgccggtgatgccgccggaatgtgtatgaacctcggttttaccattcgcggtatggatctggcgattgccgccggggaagccgcagcaaaaaccgtgcttagtgcgatgaaaagcgacgatttcagtaagcaaaaactggcggaatatcgtcagcatcttgagagtggtccgctgcgcgatatgcgtatgtaccagaaactaccggcgttccttgataacccacgcatgtttagcggctacccggagctggcggtgggtgtggcgcgtgacctgttcaccattgatggcagcgcgccggaactgatgcgcaagaaaatcctccgccacggcaagaaagtgggcttcatcaatctaatcaaggatggcatgaaaggagtgaccgttttatgacttctcccgtcaatgtggacgtcaaactgggcgtcaataaattcaatgtcgatgaagagcatccgcacattgttgtgaaggccgatgctgataaacaggcgctggagctgctggtgaaagcgtgccccgcaggtctgtacaagaagcaggatgacggcagtgtgcgcttcgattacgccggatgtctggagtgcggcacctgtcgcattctggggctggggagcgcgctggaacagtgggaatacccgcgcggcacctttggtgtggagttccgttacggctgatgttggtttgatacgtaacgccgcactgactctcattgcaaaaaacaggaataaccatgcaaccgtccagaaactttgacgatctcaaattctcctctattcaccgccgcattttgctgtggggaagcggtggtccgtttctggatggttatgtactggtaatgattggcgtggcgctggagcaactgacgccggcgctgaaactggacgctgactggattggcttgctgggcgcgggaacgctcgccgggctgttcgttggcacaagcctgtttggttatatttccgataaagtcggacggcgcaaaatgttcctcattgatatcatcgccatcggcgtgataagcgtggcgacgatgtttgttagttcccccgtcgaactgttggtgatgcgggtacttatcggcattgtcatcggtgcagattatcccatcgccaccagtatgatcaccgagttctccagtacccgtcagcgggcgttttccatcagctttattgccgcgatgtggtatgtcggcgcgacctgtgccgatctggtcggctactggctttatgatgtggaaggcggctggcgctggatgctgggtagcgcggcgatcccctgtttgttgattttgattggtcgattcgaactgcctgaatctccccgctggttattacgcaaagggcgagtaaaagagtgcgaagagatgatgatcaaactgtttggcgaaccggtggctttcgatgaagagcagccgcagcaaacccgttttcgcgatctgtttaatcgccgccattttccttttgttctgtttgttgccgccatctggacctgccaggtgatcccaatgttcgccatttacacctttggcccgcaaatcgttggtttgttgggattgggggttggcaaaaacgcggcactagggaatgtggtgattagcctgttctttatgctcggctgtattccgccgatgctgtggttaaacactgccggacggcgtccattgttgattggcagctttgccatgatgacgctggcgctggcggttttggggctaatcccggatatggggatctggctggtagtgatggcctttgcggtgtatgcctttttctctggcgggccgggtaatttgcagtggctctatcctaatgaactcttcccgacagatatccgcgcctctgccgtgggcgtgattatgtccttaagtcgtattggcaccattgttagcacctgggcactaccgatctttatcaataattacggtatcagtaacacgatgctaatgggggcgggtatcagcctgtttggcttgttgatttccgtagcgtttgccccggagactcgagggatgagtctggcgcagaccagcaatatgacgatccgcgggcagagaatggggtaaattgttcagatttctctcttttctgaatcaatattattgactataagccgcgtgaatatatgactacactttgtgggaaaacaaaggcgtaatcacgcgggctacctatgattcttataatttatgcgcatccgtatccgcatcattcccatgcgaataaacggatgcttgaacaggcaaggacgctggaaggcgtcgaaattcgctctctttatcaactctatcctgacttcaatatcgatattgccgccgagcaggaggcgctgtctcgcgccgatctgatcgtctggcagcatccgatgcagtggtacagcattcctccgctcctcaaactttggatcgataaagttttctcccacggctgggcttacggtcatggcggcacggcgctgcatggcaaacatttgctgtgggcggtgacgaccggcggcggggaaagccattttgaaattggtgcgcatccgggctttgatgtgctgagccagccgctacaggcgacggcaatctactgcgggctgaactggctgccaccgtttgccatgcactgcacctttatttgtgacgacgaaaccctcgaagggcaggcgcgtcactataagcaacgtctgctggaatggcaggaggcccatcatggataattaaggaatggcaggaggcccatcatggatagccatacgctgattcaggcgctgatttatctcggtagcgcagcgctgattgtacccattgcggtacgtcttggtctgggaagcgtacttggctacctgatcgccggctgcattattggcccgtgggggctgcgactggtgaccgatgccgaatctattctgcactttgccgagattggggtggtgctgatgctgtttattatcggcctcgaactcgatccacaaaggctgtggaagctgcgtgcggcagtgttcggctgtggcgcattgcagatggtgatttgcggcggcctgctggggctgttctgcatgttacttgggctgcgctggcaggtcgcggaattgatcggcatgacgctggcgctctcctctacggcgattgccatgcaggcgatgaatgaacgcaatctgatggtgacgcaaatgggtcgcagtgcctttgcggtgctgctgttccaggatatcgcggcgatcccgctggtggcgatgattccgctactggcaacgagcagtgccagcacgacgatgggcgcatttgctctcagcgcgttaaaagtggcgggtgcgctggtgctggtggtattgctggggcgctatgtcacgcgtccggcgctgcgttttgtagcccgctctggcttgcgggaagtgtttagtgccgtggcgttattcctcgtgtttggctttggtttgctgctggaagaggtcggcttgagcatggcgatgggcgcgtttctggcgggcgtactgctggcaagcagcgaataccgtcatgcgctggagagcgatatcgaaccatttaaaggtttgctgttggggctgtttttcatcggtgttggcatgagcatagactttggcacgctgcttgaaaacccattgcgcattgtcattttgctgctcggtttcctcatcatcaaaatcgccatgctgtggctgattgcccgaccgttgcaagtgccaaataaacagcgtcgttggtttgcggtgttgttagggcagggcagtgagtttgcctttgtggtatttggcgcggcgcagatggcgaatgtgctggagccggagtgggcgaaaagcctgaccctggcggtggcgctgagcatggcagcaacgccgattctgctggtgatcctcaatcgccttgagcaatcttctactgaggaagcgcgtgaagccgatgagatcgacgaagaacagccgcgcgtgattatcgccggattcggtcgttttgggcagattaccggacgtttactgctctccagcggggtgaaaatggtggtactcgatcacgatccggaccatatcgaaaccttgcgtaaatttggtatgaaagtgttttatggcgatgccacgcggatggatttactggaatctgccggagcggcgaaagcggaagtgctgattaacgccatcgacgatccgcaaaccaacctgcaactgacagagatggtgaaagaacatttcccgcatttgcagattattgcccgcgcccgcgatgtcgaccactacattcgtttgcgtcaggcaggcgttgaaaagccggagcgtgaaaccttcgaaggtgcgctgaaaaccgggcgtctggcactggaaagtttaggtctggggccgtatgaagcgcgagaacgtgccgatgtgttccgccgctttaatattcagatggtggaagagatggcaatggttgagaacgacaccaaagcccgcgcggcggtctataaacgcaccagcgcgatgttaagtgagatcattaccgaggaccgcgaacatctgagtttaattcaacgacatggctggcagggaaccgaagaaggtaaacataccggcaacatggcggatgaaccggaaacgaaacccagttcctaataaagagtgacgtaaatcacactttacagctaactgtttgtttttgtttcattgtaatgcggcgagtccagggagagagcgtggactcgccagcagaatataaaattttcctcaacatcatcctcgcaccagtcgacgacggtttacgctttacgtatagtggcgacaattttttttatcgggaaatctcaatgatcagtctgattgcggcgttagcggtagatcgcgttatcggcatggaaaacgccatgccgtggaacctgcctgccgatctcgcctggtttaaacgcaacaccttaaataaacccgtgattatgggccgccatacctgggaaagtatcggtcgtccgttgccaggacgcaaaaatattatcctcagcagtcaaccgggtacggacgatcgcgtaacgtgggtgaagagcgtggatgaagccatcgcggcgtgtggtgacgtaccagaaatcatggtgattggcggcggtcgcgtttatgaacagttcttgccaaaagcgcaaaaactgtatctgacgcatatcgacgcagaagtggaaggcgacacccatttcccggattacgagccggatgactgggaaagcgtattcagcgaattccacgatgctgatgcgcagaactctcacagctattgctttgagattctggagcggcggtaattttgtatagaatttacggctagcgccggatgcgacgccggtcgcgtcttatccggccttcctatatcaggctgtgtttaagacgccgccgcttcgcccaaatccttatgccggttgctcggctggacaaaatactgtttatcttcccagcgcaggcaggttaatgtaccaccccagcagcagccggtatccagcgcgtatataccttccggcgtacctttgccctccaggcttgcccagtgaccaaaggcgatgctgtattcttcagcgacagggccaggaatcgcaaaccacggtttcagtggggcaggggcctcttccgggctttctttgctgtacatatccagttgaccgttcgggaagcaaaaacgcatacgggtaaaagcgttggtgataaaacgcagtcttcccagcccccgcaattccggactccagttatttggcatatcgccgtacatggcatcaagaaagaagggataggagtcactgcttagcaccgcttctacatcgcgtgcgcactctttggcggtctgcagatcccactgcggcgtgatccctgcgtgggccatcaccagctttttctcttcgtcgatttgcagcagaggctggcgccgcagccagttaagcagctcgtcggcatccggcgcttccagcagcggtgtcaggcgatctttcggtttattgcggctgatcccggcaaataccgccagcagatgcagatcgtgattgcccagcaccagacgtacgctgtcgcctaaggatttcacatagcgcagaacatccaggctacccggcccgcgcgcgaccagatcgcccgtcagccagagggtatctttcccaggggtaaattctactttatgcagcaatgcgatcagttcatcgtaacaaccatgaacgtcgccaataaggtatgtcgccatattcttttaatgaatgagtgtgggaacggcgagtcggaatacgggaatgtcgatgctgaaagggacgccattttcatcgatcatttcgtagtgaccctgcatggtgcccagcggggtttcaatgattgcaccgctggtgtactggtactcttcgccaggcgcgataagtggctggacgccaaccactccttcgccctggacttcggtttcacggccattgccattggtgatcagccagtaacgccccaacaactgcactggcgctcgccccagattgcgtatggttacggtataagcaaaaacgtaacgttcattatcaggactagattgagcctcaatgtagacgctttgaacctgaatacacactcgggggctattgatcatcgttaactctcctgcaaaggcgcgttctccgccagatagttcgccatctggcaatattgcgcgacagagatattttccgctcgcatcgccgggtcgatccccattcccgttaacacctcgacgctaaacaggttgccgaggctgttacgaatggttttacgacgctggttaaaggcttcggtggtgatgcggctcaacacacgaacatctttaaccgggtgaggcatcgttgcatgaggaaccaggcgcacgacggcggaatccactttgggtggtggtgtaaaggcactcggcggtacttccagtaccgggatcacattgcaatagtattgcgccatgacgcttaatcgaccatacgctttgctgttcggtcctgcaaccagacgattcaccacctctttttgcaacataaagtgcatgtcggcaatggcatcagtatagctaaacagatggaacatcaacggcgtggagatgttataaggcaggttgccgaaaacacgcagcggctgacccattttctcggccagttcaccaaagttaaaggtcatcgcatcctgctgataaatcgtcagtttcgggcctaagaatggatgcgtttgcagacgtgccgccagatcgcggtcaagttcgatgaccgtcagctggtccagacgttcgccgaccggttcggtcaatgccgccagaccggggccgatttcgaccatcgcctggcccttttgcgggttaatggcagacacaatactgtcgatcacgaactgatcgttgagaaagttttgcccgaagcgtttacgggctaagtggccctggtggactcgattattcattgggtgttaacaatcattttgatggcgagattaagcgccgtaataaaactgccggcatcggctttgccacgtcccgccagttcaagcgcggtgccgtggtccacacttgtgcgaataaagggcaggcccagcgtaatgttcacaccgcgcccgaagccctggtattttagcacgggaagaccctgatcgtggtacatcgccagcacggcgtcggcgttatcaagatatttcggctgaaacagggtatcggcaggcagcggcccgttgagtttcatcccctgcgcccgcagctcattgagcaccggaataatggtgtctatctcttccgtacccatatgaccgccttcgcccgcgtgcggattcagcccgcagaccagaatgcgcggttcggcaataccaaatttggtccgcaaatcgtgatgcaaaatagcaatcacttcgtgcaaaagtgcaggggtgatagcgtctgcgatatcgcgcagcggtaaatgcgtcgttgccagcgccacgcgaagttcttcggtcgccagcatcatcaccacctttttcgcctggctacgctcttcgaaaaactcggtatgaccggtaaaaggaatgccagcgtcgttaataacgcctttatgcaccggacctgtgatcagcgcggcaaattcgccgttcagacaaccatcgcacgctcgcgccagcgtttccaccacataatgcccattttcaaccgctaactgccccgcagtgacaggtgcacgtagcgcgacaggaagtagcgttaatgtgcccgcagtttgcggttgtgcaggggagttgggggaataagggcggagggtgagcggcaaaccgagcatcgctgcccggttggtaaggagagtggcatcggcacaaacaaccagttcgaccggccactcacgctgtgcaagctggacaactaagtccgggccaatcccggcgggctcgccgggagtgatcacaacacgttgggttttaaccattagttgctcaggattttaacgtaggcgctggcacgttgttcctgcatccagcttgctgcttcttcgctgaacttacggttcatcagcatgcggtatgcacgatctttctgcgcagcgtcggttttatcgacattacgggtatccagcagttcgattaaatgccagccgaaactagagtgaaccggtgcactcatttgacctttgttcaggcgagtcagggcgtcacggaaggccggatcgaaaatatctggtgtagcccagccgagatcgccgccctggttagcagagcctggatcctgagagaactctttcgctgcggcagcaaaagtcgttttaccactcttgatatcagcagcaatctgttccagtttcacacgggcctgttcgtcagtcatgatcgggctcggtttcagcagaatatggcgagcatgaacttcggtcacgctgatatttttgctttcgccgcgcaggtcgttaactttcagaatatggaagccaacgccggaacgaatcgggccaacaatgtcgcctttcttcgcggtgcttaatgcctgggcgaagatcccgggcaactcctgaatacggccccagcccatctggccgccgttcagcgcctgctggtcggcagaatgagcaatcgccagcttaccgaaatcagcgccgttacgcgcctgatcgacaatggcgcgcgcctggctttccgcttcgttcacctgatcagaggtcgggttttccggcagcgggatcaggatgtggctcaggttcagctcagtgctggcgtcgttttggttacccacctgctgcgccagggattcgacttcctgcggcaggatggtgatgcgacgacgcacctcgttgttacgcacttcagagataatcatctctttgcggatctggttacgataggtgttgtagttcagtccatcgtaagccagacggctgcgcatctgatccagcgtcatgttgttctgtttcgcgatgttagcaatcgcctgatccagctgctcatcggagattttcactcccattttctgccccatctgcaggatgatttgatccatgatcaaacgttccatgatttggtggcgcagcgtcgcgtcatcaggaagttgctgccttgcctgagcagcgttcagttttacgctctgcattaatccatcaacgtcgctttccagcacgacgccgttattgacgacggctgcgactttatcgactacctggggggcagcgaaactggtattcgcgatcatggcgataccgagaagcagcgttttccagttcttcatactttttccatttcaattaaccgcactgcggattacgtggtaaatcaacaaatcacaaagtgttttgatacggcagaatgttgctacgcagcatctcttgcgtacccagaccgtagttggagctcaggccgcgaagttcgatgttaaagccgattgcgttgtcatataccgcatgttgtttatcgttatcccaaccgttcagcttccgctcgtaaccgacgcgaattgcatagcagcaggagctgtattgcacacctaacatagagtcggcttgcttgttagcattggtgtcgtagtagtaggccccaacaatggaccaacgatcggcaattggccagctggcgacagcacctacctggctaataccattcttatattgctcagcagtggaatagtacttaggcagcgtagcctgaatatattccgggctggcgtaacggtaattcagctgtaccagacggtcttcatcccgacggtattcaatgctggagttactggtcgctacgttatccagacgtgtatcgtactgaatcccgccacgcaatccccaacgctcggagatacgccagtaagtatcgcctgcccacaccagactacccgttttgtcgtcattctcccatgttatgttgtcatcgccagtgcgagactccgtgaaatagtagatttgaccaacggaaatattaaaacgttcaacggcagcatcatcatatatgcgagatgtgacaccggtcgtcacctggttagcggaggcaatacggtcaagaccgccgtaagtccggtcccggaacaggccagagtagtcagattgcagcagagagctgtcgtagttatagatgtcgctctgatcgcgatacggcacgtacaaatactgcgcgcgcggttccagcgtttgggtataacccggagccagcatttccatatcgcgttcaaagaccattttgccgtcaactttgaattgcggcattacgcggttaacggattcgtccagcttggtcgtgtttctggagttataccagtcaagattggtttgctgataatgggttgccagcaacttcgcttcggtattgatgctgccccagttattagagagcggcaaattgatggtcggttccaggtgaacacgggttgcttcaggcatgtcgtctctggtgttaacaaagtgcactgcctggccgtaaatacgcgtatcaaacggaccaacatcattctggtagtaattaacgtctaactgcggctctgcgctgtagctactggtgttctgttcgctgaaaacctggaactgcttggtactaacggtggcattgaagttttgcaccgcatagccaacgctgaatttttgcgttgcgtagccgtcagtactggaaccgtacttgttatcgaaatcattgaagtagctaggatcgctgaccttggtgtagtcgacgttgaaacgccacacctgatccatgaccccggagtggttccagtagaataaccaacgacgactactgtcatcgttcgggtgttcatcttcatagactttatcactaggcagatagtccagttccatcaagccagcgcccgcctgggagaggtagcggaattcgttctcccacatgatgttgccacgacgatgcatataatgcggcgtgatggtggcatccatatttggcgcgatgttccagtaatatggcaggtagaactcaaagtagttggtggtggtgtacttggcgttcgggatcaagaaaccagagcgacgtttgtcacccaccggcaactgcaaataggggctataaaagatcggtaccggacccaccttaaagcgggcgttccagatctccgcaacttgttcttcgcggtcatgaataatttcgctacctaccacgctccaggtgtcagaacccggcagacaggaggtaaagctaccgttatccagaatggtatagcggttttcgccacgttgtttcatcaggtccgctttaccgcgaccctggcgacccaccatctggtaatcaccttcccagacgttggtatctttggtgttcagattcgcccagcctttcggccctttgaggatcacctggttatcgtcgtaatggacattaccgagcgcatcaacggtacgtaccggctccggttgtcctggtgcctctttttgatggagctgcacttcgtcggcctgcagacggctgttaccctgcatgatatccacgctgccagtaaacacggcgtcatccgggtagtcccctttcgcgtggtcagcattgatagtcacgggtaagtcattggtatcgccctgtaccagaggacggtcatagcttggcacgcccaacatgcactgactggcgaggtcggctgccagtccctgttgactataaagggcggtggcaatcatggtggccaggagagtggggatacgttttttcatacgttgattttattgttccatcatcggtaacgttgcgcgtgacaaacggtcagagactaacgtactcgtcatctctacgctagtgttaatcctgtccgaatagcgtcagtggtgttaggcacggcattgaatgacaggtatgataatgcaaattataggcgatgtcccacaattgaccgcagccggaaaacggtaaaagcacctttatattgtgggagatagccctgatatccgtgtgtcgatttggggaatatatgcagtattggggaaaaatcattggcgtggccgtggccttactgatgggcggcggcttttggggcgtagtgttaggcctgttaattggccatatgtttgataaagcccgtagccgtaaaatggcgtggttcgccaaccagcgtgagcgtcaggcgctgttttttgccaccacttttgaagtgatggggcatttaaccaaatccaaaggtcgcgtcacggaggctgatattcatatcgccagccagttgatggaccgaatgaatcttcatggcgcttcccgtactgcggcgcaaaatgcgttccgggtgggaaaaagtgacaattacccgctgcgcgaaaagatgcgccagtttcgcagtgtctgctttggtcgttttgacttaattcgtatgtttctggagatccagattcaggcggcgtttgctgatggtagtctgcacccgaatgaacgggcggtgctgtatgtcattgcagaagaattagggatctcccgcgctcagtttgaccagtttttgcgcatgatgcagggcggtgcacagtttggcggcggttatcagcagcaaactggcggtggtaactggcagcaagcgcagcgtggcccaacgctggaagatgcctgtaatgtgctgggcgtgaagccgacggatgatgcgaccaccatcaaacgtgcctaccgtaagctgatgagtgaacaccatcccgataagctggtggcgaaaggtttgccgcctgagatgatggagatggcgaagcagaaagcgcaggaaattcagcaggcatatgagctgataaagcagcagaaagggtttaaatgaccctgtaaatgatgctgagtaactgcccacgattaaaggtggccgccctggcggtcacttctttgagaaaaggcgtttactcagaatggtggacaggctcaatgcacgatttacgggaggggttctgtaggttttatcgcgttgaccctgcttaaggttgagagctttacgacgagcggaattatatttttacgtcttaaaaataaaaaacacatacctgaatgagcgatttttgaaagtatatttattcagaacgcgcatcatgagtttttaactcaatgcgaggctattaccatgaaagtaagtgttccaggcatgccggttacacttttaaatatgagcaagaacgatatttataagatggtgagcggggacaagatggacgtgaagatgaatatctttcaacgcttgtgggagacgttacgccatctgttctggagtgataaacagactgaggcttataaacttctgttcaatttcgtgaataaccagactggcaacatcaacgccagtgaatactttactggggctatcaacgagaatgagagagaaaagtttatcaatagcctggaattattcaataaacttaaaacatgcgcaaaaaatccggatgagttggtcgcaaagggcaatatgcgctgggtcgcccagaccttcggggatatcgagttaagtgtcacttttttcattgaaaagaataagatatgtactcagacgttgcagctgcataagggccaaggtaacttgggcgttgatcttagaaaggcttaccttcccggcgttgacatgagggattgttaccttggtaaaaaaacaatgaaaggtagcaatgatatcctttatgagagacctgggtggaatgctaacctgggcgtgctaccccggacggtgctaccccggacggtgctaacccggacggtgctaacctggacggtgctaccgtgaacggtgctacctccttatatgatgaggtaattattattaataaaatcccccccaaaaaaattgatactaaaggagttgctactgaagaagttgctactaaaaaagtactgctgaacaaattactgacaacgcaattattgaatgagccagaataagctaaggttgaaggggctggaacgccccttcaaccttagcagtagcgtgggatgatttcacaattagaaagacctgcatgatgagctagagaagaggctagtgacgcaaggcgtcgtgcaggacacggatcaccgagatgggcatcgccaaccagactgctaattagcccatgaataacaatcagaaaggaccataacagacccgttaaaatgaaatataagagacggtcaacgggtgaagaaaaagttcaaaaattcgctgtggagcaggaagggaattaccgaatggaaagcgtagccacacgcaacaactgaaagcagtttggcagaaacaaaaaatccccggactcggggatttatgtacaagaggcagcccttaggatgagggtataaacgtacaggaaaggttaaaaatccgctggcgctttaaacgtcatactattgccatacgccggatgggtaatcgtcaacatctctgcatgtagcaacaaacgtggtgccatcgctctcgcttctggacttgcataaaaacgatcgccgagaatcggatgacccagcgccagcatatgcacacgcaattgatggctacgcccggtaatcggttttaacaccactcttgccgtgttatccgccgcatactccaccacttcatattccgtctgcgcaggtttacccgtttcgtaacagactttctgtttcgggcggtttggccagtcgcaaatcagcggcagatccaccagaccttctgcgggggatggatgcccccagacgcgggccacatactgctttttcggctcgcgctcgcggaactggcgttttaactcccgctccgcggctttggtcagcgccactacaatcacgccgctggtagccatatccagacgatgcacgctttctgcctgcggataatcacgctgaatgcgcgtcatcacgctgtctttgtgctcttccagacgacccggcacactcaacaaaccgctcggcttgttgaccaccataatatggtcatcctgatacaggataaccaaccagggttcctgcggtggattgtagttttccatccccattttcggctccgttactgatgcgttacaacgatcaaacgcagggcatccagacgccaacctgcctgatccaggctttccattacctgctgacggttgctctcaatggcggtcagttcgtcgtcacgaatgttcgggttcactgcacgcagagcttccagacgagacagctcggcagacagtttttcgtcggcttcgttacgcgctgcatcaatcaatgcacgggcagatttctcgatctgcgcttcacccagttgaaggatagcgtgaacatcctgctgcacggcgttaaccagtttgctgccggtgtgacggttaaccgcgttaagctggcggttaaaggtttcaaactctacctgcgccgccaggttgttgccgtttttatccagcagcatacgtaccggcgtcggtggcaggaagcggttgagctgcaactgcttcggagcctgggcttcaaccacataaatcagttccaccaacagcgtacctaccggcaacgctttgttttttaacagactaatcgtgctgctaccggtatcgccagaaaggatcagatccagaccgttgcggatcagcggatgctcccaggtaataaactgtgcatcttcacgcgccagcgccacttcacgatcaaaggtgatggtgatgccatcttcgctcaggccagggaagtccggcaccagcatatgatcggacggcgtcagcacgatcatgttgtcgccgcgatcgtcctgattgataccgataatatcgaacaggttcatggcgaaggcgatcaggttggtatcgtcatcctgctcttcaatgctttctgccagtgcctgggctttttcgccaccgttggagtggatttccagcaggcggtcacgaccctgttccagctgtgctttcagcgcttcatgttgctcgcggcagtttttgatcagatcgtcaaagccttcggtttgatccggactagccagatagttaatcagatcgttgtatacgctatcgtaaatagtgcgtccggtcgggcaggtgtgctcaaatgcatccagaccttcgtgataccagcgcaccagcacgctctgagcggttttctccagataaggcacatggatctgaatatcgtgcgcctggccgatacgatccagacgaccaatacgctgctccagtagatccgggttgaatggcaggtcaaacatcaccatgtggctggcgaactggaagttacgtccttcagaaccgatttcactgcacagcagtacctgtgcgccggtgtcttcttcggcaaaccaggcggcagcgcggtcacgttcgataatgctcataccttcgtggaacaccgcagcgcgaataccttcacgttcgcgcagtacctgctccagttgcagcgcagtggcagctttggcgcagatcaccagcactttctgagagcgatggctggtcaggtagcccatcagccactcaacgcgcggatcgaagttccaccaggtggcgttatcaccttcaaattcctgataaatacgctccgggtagagcatatcgcgagcacgatcttccgcacttttacgtgcgcccataatgccggagactttaatagccgtctgatactgcgtcggtagcggcagcttaatggtgtgcagctcgcgtttcgggaatcctttcacaccgttacgcgtgttacggaacagcacgcggctggtgccgtggcgatccatcagcatgctaaccagctcctgacgggcgctctgggcatcttcgctgtcgctgtttgctgcctgcaacagcggctcgatatcctgctcgccgatcatctcgccgagcatgttcagttcgtcattgctcagtttgttacctgccagcagcatggcaacggcgtccgcaaccggacgataatttttctgctcttcaacgaactgcgcaaaatcgtggaaacggttcgggtccagcagacgcagacgggcgaagtggctttccatccccagctgttccggggtcgcggtcagcagcagaacgcccggcacgtgctctgccagttgttcaatggcctgatattcacggcttggcgcatcttcgctccacaccaggtgatgcgcttcatcgaccaccagcaggtcccattcggcttcacagagatgttccaggcgctgtttgctacgacgggcaaaatccaggctgcaaatcaccagctgttcggtgtcaaacgggttgtaagcatcgtgctgagcttcggcataacgctcatcatcaaatagcgcaaagcgcaggttgaaacggcgcagcatttctaccagccactgatgctgtaaggtttccgggacgataattagcacacgttcagcagcgccagagagcagttgctgatgcaggatcatcccggcttcaatggttttccctaaacccacttcgtcagccagcaggacgcgcggcgcgtggcggcgaccaacatcatgagcgatgttgagctgatgcgggatcaggctggtacgctgaccgcgcaggccgctgtacggcatacggaactgttcgctggaatatttacgcgcgcgataacgcagcgcaaagcggtccatacggtcaatctgcccggcaaacagacggtcctgcggtttgctgaacaccagtttgctatcaaggaaaacttcacgcagggctacgccggactcttcagtatccaggcgagtaccgatataggtcagcaagccattttcttcttttacttcttcgacttgcatctgccagccgtcatggctggtaatggtatcaccagggttgaacatcacgcgggtcacgggggaatcactgcgtgcgtacagacggttttcaccagtagatgggaaaagtaaagtgacagttcgcgcatccaccgcgacaacggttccaagtcccaattcgctttctgtatcgctgatccagcgttgaccaagtgtaaaaggcatatgtgttcggctctatatctttaattgcaggcaataaccacccgctaccgtgcttatgaggtagtggtgttattcaggtccaggaatggaaagggcgctatggtactggatggcaaagcattcgtcacgcatcaaaatggtatctggcgaactcttttttttgctcaaaatagcccaagttgcccggtcataagtgtagcaaaattatcctcaataaaagggagtattccctccgccacgggttgtagctggcgggtcagatagtgttcgtaatccagtggactacgttggtagtccagcggctccgggccgttggtggtccatacgtacttaatggtgccgcgattctgatattgcaaggggcgaccacgcttttggttttcttcatcggcaaggcgagcggcgcgtacatgaggcggcacattacgctgatactcgctcagcggacggcgaaggcgtttacggtaaaccagtcgcgcatccagttcacccgccatcagtttgtcgatggtttcgcgtacatattcctgatatggctcgttgcggaagatgcgcaggtatagctcctgctgaaactgctgggccagcggcgtccagtcggtgcgcacggtttccagccctttaaacaccatccgctgcttgtcgccctcctgaatcagtccggcataacgctttttactgccggtatcggctccgcgaatggttggcatcagaaaacggcagaaatgggtttcatactccagttctaatgcgctggtcagccgttgtttttgcagcgtttccgcccaccaggcgttaacgtgctgcaccagtgcacgaccgattttcgccgcttcttcttcgctatgtgcgcctttcagccagacaaacgtactgtcggtatcgccgtagataacgtcgtagccctgtgcttcaatcaacgctttggtttgccgcatgatctgatgaccacgcatggtgatgctgcttgccagccgcggatcgaagaagcggcaggcggtggtgccgagcacgccataaaaggcattcatgatgattttcagcgcctggctcagcggtttgttaccctggcgtttggcttcatcgcgcccgtgccagatgttagtcacaatctccggcaggcaatgtttttctcggctgaaccaggcatcgagaaaaccttcggtactgtgctctggatcaggctgcgccatgccttccaccagcccgacgggatcaatcagaaaggtgcggatgatgctcgggtacaggcttttatagtccagcaccagcacactatcataaagccctggccgactatccatcacgtagccgccagggctggcgtgcggcggcacttcgccgagattaggcgcgacataaccagcgcgatgcattcgcggaaaatagagatgaccaaatgccgccacgctaccgccgtgtcggtccaccggcaggccgttcaccgttgcccgttcgagtaaaaatggcatgatttcagttttgtggaagatctgcgtcaccagctcgcaatctttcaggttataagttgccagcgcaggtttatcttcggcgaaacggcggtcaatttcgtccattcgatcccacgggttatcgatagattttccttcgcctaatagctcctgagcgacagtttccaggctgaaactagagaaattccagaacgcggatttcagcgcctcgataccgtcgataattagccgacctttagcctgggcaaaaaagacgccgtttttaaagccgtgctcgcgccactccagctcgctattatcgcgcccaagacgcagcggaagacggtaacgctcggcatgtttttgcagcattcgcagatcgaactgcaccacgttccaaccgatgatcacatcaggatcgtagttggcaaaccaggcgttgagtttttccagcaactgcgggcggctggcgacgtattccagttcgaaatcaaggctggaggcgtcgccattctccggccccagcatataaacgatgcgctgcccgcagccttccaggccgatgcagtacagctcaccgtggcgggtggtttcaatatctatagaaacccacttgagcggcggacgatagtcgggatgcggtttcagacgggcattaacgatagtgccattgtgcatatcaccctcgacccacaccggactggtgataaaccgctccatcagatagcgttctggcggacgcacatcggcctcgtagacggtaacgccaccttcacgcaggcgcttttcgtaattcatcaattggcgatgggcgcgacagtaaaggccatacaccggctggcggtgaaaatcctttaacgccagcggtgtcaggcgaaagccttgttcaccctgcaaaatatgctgagcgcggggaacctgatcggcgggaataaacgccacggactcttgcggtgcaagcgtaacctgcaacggcccgttgtccgtcgccagccagaaggagacttctgtcccttgcggggtgtcccgccagtgtcgggttaagataaaacctgcctgcgccacgctgaaaatccatcaaaaaaccaggcttgagtatagcctggtttcgtttgattggctgtggttttatacagtcattactgcccgtaatatgccttcgcgccatgcttacgcagatagtgtttatccagcagcgtttgctgcatatccggtaactgcggcgctaactgacggcagaatatccccatataagcgacctcttccagcacgatggcgttatgcaccgcatcttcggcatttttgccccatgcaaacgggccgtgggaatggaccagaacgccgggcatttgcgctgcatcgataccctgtttttcaaaggtttctacgatgacgttaccggtttcccactcatattcgccgttgatttctgcgtcggtcattttgcgggtgcagggaatggtgccgtagaaatagtcggcgtgggtggtgccggttgctggaatgctctgacccgcctgcgcccagatggtggcgtggcggctgtgcgtatgcacaatgccgccaatggaggggaatgcctgatagagcagccggtgagttggcgtgtcggaggagggctttttcgtaccttcaaccacttcaccggtttcgatgctaaccacgaccatatcgtcagcggtcatgacgctgtaatcgacgccggaaggtttgatcacaaagacgccgcgctcgcgatcaacggcgctgacgttgccccatgtgagcgtgaccaggttgtgttttggcagcgccaggttggcttctaatacctggcgtttgagatcttctaacatgttgactccttcgtgccggatgcgctttgcttatccggcctacaaaatcgcagcgtgtaggcctgataagacgcgccagcgtcgcatcaggcgttgaatgccggatgcgctttgcttatccggcctacaaaatcgcagcgcgtaggcctgataagacgcgccagcgtcgcatcaggcgttgaatgccggatgcgctttgcttatccggcctacaaaatcgcagcgtgtaggccagataagacgcgtcagcgtcgcatcaggcgttacataccggatgcggctacttagcgacgaaacccgtaatacacttcgttccagcgcagcgcgtctttaaacgctggcaggcgtgtgtcgttatcaatcaccgtgatttcaatgtcgtgcatctcggcgaattggcgcatatcgttgaggttcagtgcatggctgaagacggtatggtgcgcgccaccagcgaggatccacgcttcggaagcagttggcagatccggttgcgctttccacagcgcattcgccaccggcagtttcggcagggagtgcggtgttttcaccgtgtcgatgcagttaaccagtagacggtaacgatcgccgagatcaatcaagctggcgacaatcgctgggccggtttgggtattgaagatcaggcgggcaggatcgtccttaccaccaataccgagatgctgaacgtcgaggatcggtttctcttctgcggcgatgctcgggcagacttccagcatatgggagccgagcaccaggtcattacctttctcgaagtgataggtgtagtcctccataaaggaggtgccgccctgcagaccggtactcatcaccttcatgatgcgaagcagggcggcagttttccagtcgccttcgcccgcaaagccgtaaccctgctgcatcagacgctgtacggccagaccaggaagctgtttcagaccgtgcaaatcttcaaaggtggtggtgaacgcgtggaagccaccttgttccaggaaacgcttcatccccagctcaatacgcgccgcttccagcacgttctgtcgttttttgccgtggatttgtgtggcaggcgtcatggtgtagcagctttcgtactcatcgaccagcgcgttaacatcgccgtcgctgatggagttcaccacctgcaccagatcgccaaccgcccaggtattgacggagaaaccgaacttgatctgtgcggcaactttatcgccatcggtgaccgccacttcacgcatgttatcgccaaatcggcagactttcagatgacgggtatcctgtttagagaccgcctgacgcatccaggagccgatacgctcatgggcttgtttatcctgccagtgaccggtaaccacggcatgttgctgacgcatacgcgcgccaatgaagccgaactcgcgaccgccatgtgcagtctggttcaggttcataaagtccatatcgatactgtcccacggcagcgccgcgttgaactgggtgtggaattgcagcaacggtttgttgagcatggtcaggccgttgatccacattttggccggggagaaggtgtgcagccacaccaccagaccagcgcaacgatcgtcgtaattcgcgtcgcggcaaatagcggtgatttcatccggcgtggtgcccagcggtttcaacaccagtttgcagggcagtttcgcttccgtattcagcgcattaacgacgtgctcggcatgttgggtgacctgacgcagggtttccgggccatacagatgctggctgccaatgacaaaccacacttcataattatcaaaaatcgtcattatcgtgtccttatagagtcgcaacggcctgggcagcctgtgccggggcggaagttggaagatagtgttgttcggcgctcatcgcccattgctgatagcggcgataaagctgttcaaagcgttgtgcctgctcgctgcacggttgcagggttttctctaccgcactggccattttttgctgagcacttgggatgtctgcgtgcactttcgcggcgacggcagcaaaaatcgccgcaccgagcgcacagcactggtcagaggcaacaatttgcagcgggcgattcagcacgtcgcagcaggcctgcataatgacctggtttttccgcgcgatgccgcccagtgccatcacgttattaacggcgatcccctgatcggtaaagcactccatgattgcgcgtgcgccaaaggcggtggcagcaatcaaaccgccgaacagcagcggagcgtcggtagcgaggttaagatcggtaatcacccctttcaggcgttggttagcgttcggtgtgcggcggccgttaaaccagtcgagcaccaccggcaggtgatccagagacggatttttggcccatgcttcggtcagcgccggaagcagttgtttctggctggcgttgatttgcgttttcagttccggatgctgggcggcaagctgttccagcggccagccgagtacgcgaccaaaccaggcgtagatatcaccaaacgcgctttggcctgcttccagaccgataaatccaggcaccacgctgccatcaacctgaccgcaaatacctttaactgcccgctcgccaacgctctgtttgtcggcaatcagaatgtcgcaggtggaagtaccgataacttttaccagtgcgttaggctgtgcgcctgcgccaactgcgcccatatggcagtcaaacgcgccgccggaaatcaccacgctttcaggcaggccgagacgctgcgcccattccgggcataaggtgcccaccggaatatcggcagtccaagtgtcagtgaacagcggggaaggcaaatggcgattgaggatcgggtccagctcatcaaagaaactggctggcggcaggccgccccagctttcgtgccacagagatttatgcccggcgctgcaacgtccgcgacgaatatcctgcgggcgggtggtaccggaaagcagagctggcacccagtcgcacagctcaatccagcttgcggcagattgcgccacggcgctgtcctggcgagtcacatgcaggatttttgcccagaaccattcgctggaataaataccaccaatgtagcgggagtagtcaacgttgcccggcgcgtggcacaaacgggtaatctcttccgcttcttcaaccgcagtgtggtctttccacaatacgaacatcgcgttcgggttttcggcaaactccgggcgcagcgccagcacgtttccgtcggcatcaatcggtgcgggcgtgctgccggtactgtcaacgccaatcccgaccacagctgcgcgctgttcgacgctaagctctgcaagcacggttttcagtgccgcttccatactctcaatgtagtcacgcggatgatgacggaactggttattcggggcatcacaaaattgccctttctgccaacggggataccactctacgctggtggcgatctcttcaccggtagcgcagtccaccgccaaagctcgcacagaatcactgccaaaatcgaggccaattgcaatcgccatcgtttcactccatccaaaaaaacgggtatggagaaacagtagagagttgcgataaaaagcgtcaggtaggatccgctaatcttatggataaaaatgctatggcatagcaaagtgtgacgccgtgcaaataatcaatgtggacttttctgccgtgattatagacacttttgttacgcgtttttgtcatggctttggtcccgctttgttacagaatgcttttaataagcggggttaccggttgggttagcgagaagagccagtaaaagacgcagtgacggcaatgtctgatgcaatatggacaattggtttcttctctgaatggtgggagtatgaaaagtatggctgaagcgcaaaatgatcccctgctgccgggatacagctttaacgcccatctggtggcgggtttaacgccgattgaggccaacggttatctcgatttttttatcgaccgaccgctgggaatgaaaggttatattctcaatctcaccattcgcggtcagggggtggtgaaaaatcagggacgagaatttgtctgccgaccgggtgatattttgctgttcccgccaggagagattcatcactacggtcgtcatccggaggctcgcgaatggtatcaccagtgggtttactttcgtccgcgcgcctactggcatgaatggcttaactggccgagtatatttgccaatacgggtttctttcgcccggatgaagcgcaccagccgcatttcagcgacctgtttgggcaaatcattaacgccgggcaaggggaagggcgctatagcgagctgctggcgataaatctgcttgagcaattgttactgcggcgcatggaagcgattaacgagagcctccatccaccgatggataatcgggtacgcgaggcttgtcagtacatcagcgatcacctggcagacagcaattttgatatcgccagcgtcgcacagcatgtttgcttgagcccgagccgtctgagtcatcttttccgccagcagttagggattagcgtcttaagctggcgcgaggaccaacgcattagtcaggcgaagctgcttttgagcactacccggatgcctatcgccaccgtcggtcgcaatgttggttttgacgatcaactctatttcagccgagtatttaaaaaatgcaccggggccagcccgagcgagtttcgtgccggttgtgaagaaaaagtgaatgatgtagccgtcaagttgagttaattggtaacgaatcagacaattgacggcttgacggagtagcatagggtttgcagaatccctgcttcgtccatttgacaggcacattatgcaagcattgctggaacactttattacccaatccaccgtgtatagtttgatggcggtggtgttggtggcctttctggagagcctggcgctggtcggtttgattctacccggtacggtgctgatggcggggctgggagcgctgattggcagcggcgagttaagtttctggcacgcctggctggcagggattattggctgcttgatgggcgactggatttctttctggctgggttggcgttttaaaaagccgttgcatcgctggagttttctgaagaaaaacaaagcactacttgataaaactgaacatgcgttgcatcaacacagcatgttcaccattctggtcggtcgttttgttggcccgacgcgtccgctggtgccaatggtggcgggaatgctggatctgccggtggctaaatttattacgccgaatattatcggctgcctgctgtggccgccgttttacttcctgccagggattctggcgggcgcggcgatcgatattcctgccggaatgcagagcggtgagtttaaatggttgctgctggcaacagcggtgtttttgtgggttggtggctggctgtgctggcggttatggcgcagcggtaaagcgactgaccgtttgagtcattatttgtcccgcggtcgtttgttgtggctgacgccgttgatttctgccatcggcgtggtggcgctggtggtgttaattcgccacccgttgatgccggtgtatatcgatattttgcgtaaagtggttggggtttaagagatagtcttgtgcgggttgcctgatgcgacgcttgccgcgtcttatcaggcctacaaaacgcactacccgtaggtcggataaggcgttcacgccgcatccgacagtgcatattaacccgtaatccccaatagtgcgctagcactcgccttaccgctcaacaactcattggtcataccctgccaggcgatgcgcccgtcggcgactactacgctgcgcgtggcgatccgcgccgcatcttccacgctgtggctcaccatcaatagcgtcattttttgctgctggcagctcgtgctcaccagcgtcaacatctcctgacgtaacgccggatcgagcgcagagaacggttcatcgagcaataaaatcggctgttcgcgtaccagacaacgcgctaacgccactcgctgtcgctgaccgccggaaagctcgcccggtaaccgcgccattaaattatcaatccccatctggcgggcgatagcgtgcattttcccctgctgtaccgcgttcagtttcaatcccggatttagccccagcccgatgttctgtgcgaccgtcaggtggctgaacaggttgttctcctgaaacagcatgctcaccggacggcgactcggcggcatagttgtgtgatctacgccatcgatagtcaggctaccgctggctggcgtcagaaaaccggcgatcaaattcagcagggtacttttacccgcgccgcttggcccgaggatcgccacctgctcgccgcgttccaccgttaagctaaaacgcatcggcaaatggtggtaaagccaggtgatatcagtcagttttaacatttcgccccggtagtttttcaatcacggtaaacagcagaaaacagagcagcagcagaattaacgcggtgaccgcaccgtcctggctgcgataggagccaatttgctggtagagataaaacggcagggtgcggaaatcatcgttaccgaacaacgccaccacgccaaaatcaccaatgctcagcacgcatgcaaaggccagcgcctgcgccagtggacgtttcagggcgcgcagctccaccacttttaagcgactccagccttcaatccccaggctctgacataacatgctgtagcgggcggtgatatcgcgcatcgggttttccagcactttcagcgcataagggatcgccattaacgcattggtgaaaatcacaatgccgtcagcagattgtggcaggccgatagtgttgttgagcagtaaaaagaagccggtagccagcacaatccccggcatggcgaggatcaacatgccgctcatctccagcacctgacccgccagcattttctgccgcgcccgcagttcgcgactgctccatagcagcatcatggtcagcactacgcacaatacacctgccgccagcgcaatacgcaagctggtccacagcgcctgccacagcaccggttgtgccagcacttccggcaactggcgatttaccccatcgacgatcaccgccagtaacggtggcagcaacagcagcagcgccagcacaattaacaccgtgtcgcaaatgcggctatgcagacgatcgtccgggtcgcgccagccttgcagcagcgtggtgccgggcgcaatggccttactcaatcgctgactcaacagcaccagcccgaggcagcacaccatctggagcagcgccagcattgccgcgcgggcaggatcgtagtcgtaactcagcgcctgatagattgccagctcgatagtggtcgcctgcggaccgccccccaggcttagcacggtggcgaagctggcgaaacagagcataaagataagcgcagcaaccggcgggatttgtcgccgtaaccacggccattcgacgaagcggaaaaaatgccagctacgcatcccaagctgggcggcaagttgacgctgttcgccggggatgttttccagtgcctggagtaataagcggctcgccatcggcagattaaaaaacacatgggccagcaaaataccttgcaggccgtaggggctaaaggtccactccagaccgaggctttggcagagtgttgccagccagccctggcgaccatagacgctaagaatgccgaaaacagcgaccaacaccgggaggatcaaggtcattgcacacagacgcaacagcgccagccgacccggaaagcgcctgcgatagagcgcgcgggcgaggaatatcgcgggtatgacagagagcagtgcgctgagaaacgcctgccagaaggagaagcgcaccacatgccacagatagctgtcctgccagactgccacccagtcatcctgcggcgcgttccaccacagggcgagaaacgccgccagcgcaaccgctaccaccagcgtggtggcgcttacacctggaattaaccagccgggaattaacggctgacggcgcgttgccattcgctaatccatgcctgacgttgtgccgccacttcggctggcgtgaactccaacgtggttgcgggtttggtcaatttttcaaaaccggcaggcagcgtgacgtttgccaccggatacatccagttgccggttgggatcgcattctggaaagccggagaaaccataaactggaggaatttttgcgccagctccggctgcttgctggcagcggtgcgggcggcgacttccacttgcagatagtgaccttcgctgaagttcgcggcggcgtagttatctttcttctcttcgagaatgtgataagccggagaggtggtgtaactcagtaccagatcgctttcaccttttaaaaacaggccgtaggcttcgctccagcctttggtgaccgtgaccgttttcttcgccagtttctgccaggcttgtggggcgtcatcgccatagactttttgcatccatagcaacagacccagccccggtgtactggtgcgcggatcctgataaatcacccgccagttttgatcgctctcaaccagttctttcaggctttgtggcgggtttttcagtttgttcttgtcataaacgaaggcgaagtagccataatcaaacggtacgaaagtgtcattattccagccgccgggaacgttaacggcatccgctgccacaccgcttttggcaaacagtccggttttactggcggcgtctaacaggttgttatccagccccagcaccacatcggctttactgtttttgccttccatccgtagacggttgagaaggctaacgccatcttccagcgccaccagtttcagttcgcaattacagtcggcttcaaaggcttttttaaccaccggaccaggcccccagtcggcggcgaaggaatcgtaggtataaacagtcagaacgggtttagcgaaaacgggcgctgtgcacagcaacagcaggggcagacatttttttaacactttgcacctcaaaaaagagtggcaaaggacttgagaaggagcctcaaatcccttcgccggcgttatccggatcaggttcgacgggtattttctcagcgcacgcgtacgcgtggcaccccgttgagaacggcgttagtgtagtgattttgttatcaaccagcaatcatggatccggtggcgcaaaccacgcacttttaaaatcgaaccagccgagggtattcatgcgcaggccgcgcatactgcgttgcccctgaatgatcagccagtggtgcaataatggcaccatcgctttgctggcgaccagttgctggcaccagttcgccagattcatctcgccattgcgccagcgagcagcgtcggcttgccagtcaatgggaatgcaatgttgtagcagtggcacttcgcataaatgtgcgaaaacagagaagtccagcggcagggtaaagttggcgctgtttagccagatatcactttcgatctctcctgtatgccactgatcgtagtcgatctctttgattttcagcgtgacctggtgacttgccagaatctgctgcatgatcccggcaatcacccgatgctcactgtgatcctgataaaaggttagggtgaggctttccaggccagccggtttttcgctctttatggtgcgggcatggtgccaacgggggagcagtccataagccgggaaccacagttgctggtactgttcctcagcgaaatagaccagattagttggagaaagcacatagcttacccagtccctgacttgctgattcgccccgcgatgggtgcggctgtcgaacagtaaatagtagcaaccttcctccaggcggctttcaatctctttttcctcgccctgtggaccttttagcatcagccctccggctggctcgtcggcaatttccggcagaacccagacgttaacttcgtcgattaatgcccggtaaccgaagaagtcatcgaatgcctgaattttcagttgattggtgctgttgcgaatcaccgcatacggaccggtgccgatgggatggctggcaaagttactgagggtttcccattcgcgcggcaggatcatcgccggaacttgccccagcagtaacggtaaccagcggtccggttgcgtgagatggatatccagcgtccagggcgtcgggctcacaatgtcagcaatatggctatagagcggcagcgtattgattcgttttaaagaggcgatcacatcgtccatttccagttcacgaccatggtgaaaatggactcctggacgcaaaaagaaacgccagtgaagcggactaatttgctgccagtggtgggcgatgtctgcttccagttccccattttcctcatttatgcgcgttaggctactgaagatttgccgggcgatatgggtttcggaacggcgcaatgcgctgccaggtagcagattacgcaacggacgatagtagagcacgcgcaggatgtgccgcccctggcggaagctgcggcccagatgagaaaccagcatttgccgcacagtcgctttgtcgccaaccaactgcaccagttgatcgatacgatcctgctccagcaggtcttccgcccgctgttgctgaagcgccagcccggtatagaggaatgtcagacggctgcgtttaccgcgcccgacttccgcttcccacgtcagccagccgcgatcctgcatggtgttgagcagggtgcgcatatgacgacggctgcagctcaataacgctgccagttcgttgagcgttgtgtcctggcttttaccctcgcagcattgccacaggcggatgaactgttgttgcagacgagcagatggcataaaaggggaactcctgtgcaaaagacagcaattttattttccctatattaagtcaataattcctaacgatgaagcaagggggtgccccatgcgtcagttttatcagcactattttaccgcgacagcgaagttgtgctggttgcgttggttaagcgtcccacaacgattaaccatgcttgaaggactgatgcagtgggatgaccgcaattctgaaagttgacttgcctgcatcatgtgtgactgagtattggtgtaaaatcacccgccagcagattatacctgctggttttttttattctcgccgcgctaaaaagggaacgtatgatctggataatgacgatggctcgccgtatgaacggtgtttacgcggcatttatgctggtcgcttttatgatgggggtggccggggcgctacaggctcctacattgagcttatttctgagtcgtgaggttggcgcgcaacctttctggatcggcctcttttatacggtgaatgctattgctgggatcggcgtaagcctctggttggcaaaacgttctgacagtcagggcgatcggcgaaaactgattatattttgctgtttgatggctatcggcaatgcgctattgtttgcatttaatcgtcattatctgacgcttatcacctgtggtgtgcttctggcatctctggccaatacggcaatgccacagttatttgctctggcgcgggaatatgcggataacagcgcgcgagaagtggtgatgtttagcagcgtgatgcgtgcgcagctttctctggcatgggttatcggtccaccgttggcctttatgctggcgttgaattacggctttacggtgatgtttagcattgccgccgggatattcacactcagtctggtattgattgcatttatgcttccgtctgtggcgcgggtagaactgccgagcgaaaatgctttaagtatgcaaggtggctggcaggatagtaacgtacggatgttatttgtcgccagcacgttaatgtggacctgcaacaccatgtacattattgatatgccgttgtggatcagtagcgagttaggattgccagacaaactggcgggtttcctgatggggacggcagctggactggaaataccagcaatgattctggctggctactatgtcaaacgttatggtaagcggcgaatgatggtcatagcagtggcggcaggagtactgttttacaccggattgattttctttaatagccgtatggcgttgatgacgctgcaactttttaacgctgtatttatcggcattgttgcgggtattgggatgctatggtttcaggatttaatgcctggaagagcgggggcagctaccaccttatttactaacagtatttctaccggggtaattctggctggcgttattcagggagcaattgcacaaagttgggggcactttgctgtctactgggtaattgcggttatttctgttgtcgcattatttttaaccgcaaaggttaaagacgtttgatgacgtggacgatagcggaaagcccggtcatttgaccgggcaaggggattaattcataaacgcaggttgttttgcttcataagcggcaatggcgtcgtcgtgctgcaaggtaagcccaatactgtccagaccgttcatcatgcagtggcggcggaaggcatcgatggtaaagcgataggttttctctcccgctttcacctcttgcgcttccagatccacgtcgaaatggatccccggattagctttcaccagcgcaaacagttcgtccacttctgcatcgcttaatttcaccggcagcagctggttgttaaagctattgccgtagaagatgtcagcaaaactcggcgcaatcaccactttaaaaccgtagtcggtcaatgcccagggcgcgtgctcacggctagagccacagccgaagttttctcgtgccagcaaaatggaagcgccctgatactgcgggaagttcagcacgaagtccgggtttggctgttggcctttttcatccagaaaacgccagtcgttaaacagatgcgcgccaaaacccgtacgggtcactttctgcaaaaactgtttcgggatgattgcatcggtatcgacattggcggcatccagcggaaccaccaggcctgtgtgtttgataaatttctctgccatggtgtgctccttatttaatgttgcgaatgtcggcgaaatgtccggtcacagcagcagcggcagccattgccgggctgaccagatgcgtgcgcccgccgcgcccctggcggccttcaaagttacggttgctggtggaggcacaacgttcgcccggattcagacggtcgttgttcatcgccagacacatactgcagccaggcaagcgccattcaaaaccggcttcaataaagattttatccagaccttccgcttccgcctgggcttttaccgggccagagccgggaaccaccagtgcctgcacgcctggcgcgacttttcgccctttggcgatctccgctgccgcgcgtaaatcttcaatgcggctgttggtacaggaaccgataaacactttgtcgatagccacttcggtcagcggaatacccggtttcagccccatataggccagcgctttttctgcgctcgcgcgttcaaccggatcggcaaagctagccggatcgggaatattgtcgttcacggaaatcacctggccgggattggtgccccaggtgacctgcggactaatttcttctgcttgcagagtgacaacggtatcgaaagttgcgccttcgtcggtttgcagggttttccagtaggcaacggcgtcgtcgaaatctttgcctttcggcgcatgcagacggcctttgacatagttaaaggtggtttcgtccggtgcaaccagaccggcttttgcgcccatttcgattgccatattgcacagggtcatacgaccttccatgcttaaatcacggattgcttcgccgcaaaactccaccacatgcccggtgccgcctgcgctaccggttttaccgataattgccagcacgatatcttttgcggtaatgcccggcgcggctttgccctggacttcaattttcatggtttttgcgcggccctgtttcagggtttgcgttgccagtacgtgttcaacttcggaagtgccgataccaaaggccagtgcgccaaacgcgccgtgggtggcggtatggctgtcgccgcagacaatggtcatccccggcaaggtgacgccctgttccggccccattacgtggacgatcccctgatacgggtgattcaggtcatacagttcgacgccaaattctttgcagtttttgatcagttcctgcatctggatacgcgccatttcaccgcaggcattaatgtctttggtctgggtagagacgttgtgatccatggtagcgaaggttttgcccggctgacgtaccgggcgaccgtgggcgcgcagaccatcgaacgcctgcggactggtcacttcatgcaccaggtggcggtcgatatataacagtggggtttcgttttcggcttcgtacacaacgtgagcgtcgaacaatttttcgtataacgtcttagccatgattacaccccttctgctacatagcgggcaatgatatcgcccatttcatcggtactaacggcggcagcgccacgggctaaatccccggtgcgaatgccttcttctaatgcgcggttaatggcgcgttcaatggcgcaagccgcatcatcggcatccaggctgtaacgcagcagcagtgccaggctaaggatttgtgcaatcgggttggcgatgtttttgcctgcgatatctggtgcgctgccgcccgccggttcatacagtccaaaaccttgctcgttcaggctggcggaaggcaacatccccatgctgccagtgatcattgcgcactcgtcagacagaatgtcgccaaacaggttggagcacagcagaacgtcaaactgacttggatctttaatcagctgcatggtggcgttgtcgatgtacatatgcgccagttcgacatccgggtattccgtggcgatctcgttaacgatctcccgccataaaatagaggattgcagcacgttggctttatcgatgctcgtcactttgtggcgacgcttgcgagcagattcaaacgcgatgcgggcgatacgttcgatctcaaaacggtgatacacctcggtatcaaaggctttttcatattgtccgctaccttcgcggccttttggctgaccgaaatagatgccgccggtcagttcgcgcacacacaggatgtcgaagccgtttgcggcaatgtctgcacgcagcggacagaatgcttccagcccctgatacagttttgccgggcgcaggttgctgaataatttgaagtgcttacgcagaggcagcagcgcgccgcgttctggttgctggtctggtggtaaatgttcccacttcgggccgcctacgctgccaaacagcacggcatcggcttgctcacaaccttcaaccgtcgcaggcggcagtggttgcccgtggttatcaatggctgcgccgcctacatcgtaatggctggtggtgatgcgcatcgcaaagcggttgcgcacggcatccagcactttcagcgcctgggtcatcacttccggaccaataccgtcccccggcaatacggcaatatggtaattcttgctcatcacacggtttccttgttgttttcgttgtgttgagctttgcgttgcaactctttttcgacttctgcggcacgccagatattgttcagaacgtgcaccatggctttggcagaactctcgacaatatcggtagccaggccgacgccgtggaagcggcgaccgttgtagttagcgacgatatccacctgacccagcgcatctttaccgtggcctttggcggtcaggctgtatttcaccagttcgacgttatattcagtgatgcggttaattgcctgatagacggcatcgaccggaccgttaccgttggcggcttctgctttgacttcttcgccacaggccagtttgacggcggcggtggcgatatcgttagagccagactgcacgctgaagtaatccagacggaaatgctccggctcttcttgctgcttaccgatgaaggccagcgcctccagatcgtaatcaaacacctgaccttttttgtccgccagcttcaggaaagcatcgtacaaattgtctaaattatattcactttctttataccccatctcatccatgcgatgtttcaccgccgcacgcccgctacgagaggtcagattcagctggatttggttcagaccaatagattctggtgtcatgatttcgtagttttcgcggtttttcagcacgccatcctggtgtataccggaggagtgtgcgaatgcgccgctgccaacaatggctttgtttgccgggatcggcatattacaaatctggctaactaactggctggtgcgccatatctcctggtgattaatggcggtgtggacgttgagaatatccttacgaactttgatcgccatgatgacttcttccagggaacagtttccggcacgctcgccgatcccgttcattgcgccttccacctggcgtgcaccggcatgtaccgccgccagactgtttccgaccgccaggcccaaatcgtcgtgggtatgtacggagataatggctttgtcgatgttaggcacgcgttcatacaggccgctgatgattccggcgaactcaaacggcatggtgtagcccacggtgtccggaatgttgatggtggtggcaccggcattaatcgccgcttcgaccactcgcgccagatcggcaatgggtgtacgcccggcatcttcgcaagaaaattcaacatcatcggtgtaattacgggcgcgtttcaccatatagatagcgcgttcgatcacctcgtccagcgtgctgcgcagcttggtggcgatgtgcattgggctagtggcaataaaggtatgaatacggaaggcttcggcgactttcagggattcggccgccacgtcgatatctttttccacgcagcgagctaacgcacatacgcggctgtttttaacctggcgggcgatggtttgcacgctttcaaaatcgcccgggctagagacggggaaaccgacttccatcacgtcaacacccatacgctcaagggccagcgcaatttgcagtttttctttcacactcaagcttgcctgtaacgcctgttcaccgtcgcgcaatgtggtatcgaaaataatgacttgctggctcatggtttgggtccttgtctcttttagagcgcctcgcttcgggcataaaaaaacccgcgcaatggcgcgggttttttgtttgactgcgtgctggcttaatgctggatgccgctcactcgtctaccgcgcaaagaagatgcgtttagtagtagtagaccgataaagcgaacgatgtgagtcattaaatcagctccagatgaatgcgatatgcttttagagttactggatacaaaaacggatgtcaaccctgacgcaataaaaacgtcccgccagcgtgagttctgcatccgtaaaattagctaattgtgctgcggtggttaaagtaagcgatattaatttctgcttaactaccgacgcttttcatcggttgacatatttcagcataaatttttgcatctaatcaacgaggaaaaaggggacaaaatgcacgcgttgcaaaacctatcctgatgatttgtattgaattatatgttttgcgattttttttgatattgatttggtgaatattattgatcaattaatgttaagaattaatgcattaaatatataaattaattattaaataagcacatttaatccattttgtagatgattgagtattcgcggtagttatgattagattgttttcgcaacaaaaacattatggattattatgctgtggtaaatgactcattccacggcaatggattctgtttttatcagaacccgtatctttatgttttccgaattttactcattttgctttttcttattttatatgcatgataaatcatattcttcaggattatttctctgcattccaataagggaaagggagttaagtgtgacagtggagttaagtatgccagaggtacaaacagatcatccagagacggcggagttaagcaaaccacagctacgcatggtcgatctcaacttattaaccgttttcgatgccgtgatgcaggagcaaaacattactcgtgccgctcatgttctgggaatgagccaacctgcggtcagtaacgctgttgcacgcctgaaggtgatgtttaatgacgagctttttgttcgttatggccgtggtattcaaccgactgctcgcgcatttcaactttttggtagtgttcgtcaggcattgcaactagtacaaaatgaattgcctggtagtggttttgaacccgcgagcagtgaacgtgtatttcatctttgtgtttgcagcccgttagacagcattctgaccagccagatttataatcacattgagcagattgcgccaaatatacatgttatgttcaagtctagtttaaatcagaacactgaacatcagctgcgttatcaggaaacggagtttgtgattagttatgaagacttccatcgtcctgaatttaccagcgtaccattatttaaagatgaaatggtgctggtagccagcaaaaatcatccaacaattaagggcccgttactgaaacatgatgtttataacgaacaacatgcggcggttagcctcgatcgtttcgcgagttttagtcaaccttggtatgacacggtagataagcaagccagtatcgcgtatcagggcatggcaatgatgagcgtacttagcgtggtgagccaaacgcatttggtcgctattgcgccgcgttggctggctgaagagttcgctgaatccttagaattacaggtattaccgctgccgttaaaacaaaacagcagaacctgttatctctcctggcatgaagctgccgggcgcgataaaggccatcagtggatggaagagcaattagtcagtatttgcaaacgctaactgattgcagaataggtcagacatgaatgtctggtttattctgcattttttattgaatgtagaattttattctgaatgtgtgggctctctattttaggattaattaaaaaaatagagaaattgctgtaagttgtgggattcagccgatttattatcaatttaatcctctgtaatggaggattttatcgtttcttttcacctttcctcctgtttattcttattaccccgtgtttatgtctctggctgccaattgcttaagcaagatcggacggttaatgtgttttacacattttttccgtcaaacagtgaggcaggccatggagatgttgtctggagccgagatggtcgtccgaagccttatcgatcagggcgttaaacaagtattcggttatcccggaggcgcagtccttgatatttatgatgcattgcataccgtgggtggtattgatcatgtattagttcgtcatgagcaggcggcggtgcatatggccgatggcctggcgcgcgcgaccggggaagtcggcgtcgtgctggtaacgagcggtccaggggcgaccaatgcgattactggcatcgccaccgcttatatggattccattccattagttgtcctttccgggcaggtagcgaccagcttgataggttacgatgcctttcaggagtgcgacatggtggggattagccgaccggtggttaaacacagttttctggttaagcaaacggaagacattccgcaggtgctgaaaaaggctttctggctggcggcaagtggtcgcccaggaccagtagtcgttgatttaccgaaagatattcttaatccggcgaacaaattaccctatgtctggccggagagcgtcagtatgcgttcttacaatcccactactaccggacataaagggcaaattaagcgtgctctgcaaacgctggtagcggcaaaaaaaccggttgtctacgtaggcggtggggcaatcacggcgggctgccatcagcagttgaaagaaacggtggaggcgttgaatctgcccgttgtttgcagtttgatggggctgggggcgtttccggcaacgcatcgtcaggcactgggcatgctgggaatgcacggtacctacgaagccaatatgacgatgcataacgcggatgtgattttcgccgtcggggtacgatttgatgaccgaacgacgaacaatctggcaaagtactgcccaaatgccactgttctgcatatcgatattgatcctacttccatttctaaaaccgtgactgcggatatcccgattgtgggggatgctcgccaggtcctcgaacaaatgcttgaactcttgagccaagaatccgcccatcaaccactggatgagatccgcgactggtggcagcaaattgaacagtggcgcgctcgtcagtgcctgaaatatgacactcacagtgaaaagattaaaccgcaggcggtgatcgagactctttggcggttgacgaagggagacgcttacgtgacgtccgatgtcgggcagcaccagatgtttgctgcactttattatccattcgacaaaccgcgtcgctggatcaattccggtggcctcggcacgatgggttttggtttacctgcggcactgggcgtcaaaatggcgttgccagaagaaaccgtggtttgcgtcactggcgacggcagtattcagatgaacatccaggaactgtctaccgcgttgcaatacgagttgcccgtactggtggtgaatctcaataaccgctatctggggatggtgaagcagtggcaggacatgatctattccggccgtcatagtcaatcttatatgcaaagcctacccgatttcgtccgtctggcggaagcctatgggcatgtcgggatccagatttctcatccgcatgagctggaaagcaaacttagcgaggcgctggaacaggtgcgcaataatcgcctggtgtttgttgatgttaccgtcgatggcagcgagcacgtctacccgatgcagattcgcgggggcggaatggatgaaatgtggttaagcaaaacggagagaacctgattatgcgccggatattaagtgtcttactcgaaaatgaaagtggcgcgttatcccgcgtgattggccttttttcccagcgtggctacaacattgaaagcctgaccgttgcgccaaccgacgatccgacattaagccgtatgaccatccagaccgtgggcgatgaaaaagtacttgagcagatcgaaaagcaattacacaaactggtcgatgtcttgcgcgtgagtgagttggggcagggcgcgcatgttgagcgggaaatcatgctggtgaaaattcaggccagcggttacgggcgtgacgaagtgaaacgtaatacggaaatattccgtgggcaaattatcgatgtcacacccagcctttataccgttcaattagcaggcaccagcggtaagcttgatgcatttttagcaagcattcgcgatgtggcgaaaattgtggaggttgctcgctctggtgtggtcggacttagccgcggcgataaaataatgcgttgagaatgatctcaatgcgcaatttacagcccaacatgtcacgttgggctttttttgcgaaatcagtgggaacctggaataaaagcagttgccgcagttaattttctgcgcttagatgttaatgaatttaacccataccagtacaatggctatggtttttacattttacgcaaggggcaattgtgaaactggatgaaatcgctcggctggcgggagtgagccggaccactgcaagctatgttattaacggcaaagcgaagcaataccgtgtgagcgacaaaaccgttgaaaaagtcatggctgtggtgcgtgagcacaattaccacccgaacgccgtggcagctgggcttcgtgctggacgcacacgttctattggtcttgtgatccccgatctggagaacaccagctatacccgcatcgctaactatcttgaacgccaggcgcggcaacggggttatcaactgctgattgcctgcagtgaagatcagccagacaacgaaatgcggtgcattgagcaccttttacagcgtcaggttgatgccattattgttagcacgagcttgcctcctgagcatcctttttatcaacgctgggctaacgacccgttcccgattgtcgcgctggaccgcgccctcgatcgtgaacacttcaccagcgtggttggtgccgatcaggatgatgccgaaatgctggcggaagagttacgtaagtttcccgccgagacggtgctttatcttggtgcgctaccggagctttctgtcagcttcctgcgtgaacaaggtttccgtactgcctggaaagatgatccgcgcgaagtgcatttcctgtatgccaacagctatgagcgggaggcggctgcccagttattcgaaaaatggctggaaacgcatccgatgccgcaggcgctgttcacaacgagctttgcgttgttgcaaggagtgatggatgtcacgctgcgtcgcgacggcaaactgccttctgacctggcaattgccacctttggcgataacgaactgctcgacttcttacagtgtccggtgctggcagtggctcaacgtcaccgcgatgtcgcagagcgtgtgctggagattgtcctggcaagcctggacgaaccgcgtaagccaaaacctggtttaacgcgcattaaacgtaatctctatcgccgcggcgtgctcagccgtagctaagccgcgaacaaaaatacgcgccaggtgaatttccctctggcgcgtagagtacgggactggacatcaatatgcttaaagtaaataagactattcctgactattattgataaatgcttttaaacccgcccgttaattaactcaccagctgaaattcacaataattaagtgatatcgacagcgcgtttttgcattattttgttacatgcggcgatgaattgccgatttaacaaacacttttctttgcttttgcgcaaacccgctggcatcaagcgccacacagacgtaacaaggactgttaaccggggaagatatgtcctaaaatgccgctcgcgtcgcaaactgacactttatatttgctgtggaaaatagtgagtcattttaaaacggtgatgacgatgagggattttttcttacagctattcataacgttaatttgcttcgcacgttggacgtaaaataaacaacgctgatattagccgtaaacatcgggttttttacctcggtatgccttgtgactggcttgacaagcttttcctcagctccgtaaactcctttcagtgggaaattgtggggcaaagtgggaataaggggtgaggctggcatgttccggggagcaacgttagtcaatctcgacagcaaagggcgcttaagtgtgcctacccgttatcgggaacagctgcttgagaacgctgccggtcaaatggtttgcaccattgacatttatcacccgtgcctgctgctttaccccctgcctgaatgggaaattatcgagcaaaaattaagccgtctgagcagcatgaacccggttgagcgccgtgtgcagcgcctactgttaggtcatgccagcgaatgtcagatggatggcgcaggtcgattgttaatcgcgccagtactgcggcaacatgccgggctgacaaaagaagtgatgctggttggacagttcaacaagtttgagctgtgggatgaaacaacctggcatcaacaggtcaaggaagatatcgacgcagagcagttggctaccggagacttaagcgagcgactgcaggacttgtctctataaaatgatggaaaactataaacatactacggtgctgctggatgaagccgttaatggcctcaatatccgtcctgatggcatctacattgatgggacttttggtcgcggtggtcacagtcgtctgatcctcagccagcttggcgaagaggggcgtttgctggcgatcgatcgcgacccgcaggctatcgccgttgcgaagactattgatgatccgcgcttctccatcatccacggacctttctccgcgctgggcgaatacgttgccgagcgcgatcttatcggcaagatcgacggcattctcctcgatcttggcgtctctagtccgcaacttgatgatgctgaacgtggcttttcctttatgcgcgatggtccgctggacatgcgtatggacccaacccgtgggcagagtgccgctgaatggctacaaaccgcagaagaagccgatatcgcctgggtattgaaaacctatggtgaagagcgttttgccaaacgcattgcccgcgccattgtcgagcgtaaccgcgaacagccgatgacccgcaccaaagaactggcggaagtcgtggctgctgcaacgccggtgaaagataagtttaaacatcccgcgacccgtaccttccaggcggtgcgcatttgggtaaacagtgaactggaggagatagagcaggcgctaaaaagcagcctcaacgtgctggccccgggtgggcggcttagcatcatcagcttccacagcctggaagaccgtattgtgaaacgttttatgcgtgaaaacagccgcggtccgcaagttccggcagggttaccgatgactgaagagcagctcaaaaaactgggtggccgtcagctgcgagcactaggcaagttaatgccgggcgaagaagaggtggctgagaaccctcgtgcccgtagtagtgttctgcgtattgcagagaggacgaatgcatgatcagcagagtgacagaagctctaagcaaagttaaaggaagcatgggaagccacgagcgccatgcattgcctggtgttatcggtgacgatcttttgcgatttgggaagctgccactctgcctgttcatttgcattattttgacggcggtgactgtggtaaccacggcgcaccatacccgtttactgaccgctcagcgcgaacaactggtgctggagcgagatgctttagacattgaatggcgcaacctgatccttgaagagaatgcgctcggcgaccatagccgggtggaaaggatcgccacggaaaagctgcaaatgcagcatgttgatccgagtcaagaaaatatcgtagtgcaaaaataaggataaacgcgacgcatgaaagcagcggcgaaaacgcagaaaccaaaacgtcaggaagaacatgccaactttatcagttggcgttttgcgttgttatgcggctgtattctcctggcgctggcttttctgctcggacgcgtagcgtggttacaagttatctccccggatatgctggtgaaagagggcgacatgcgttctcttcgcgttcagcaagtttccacctcccgcggcatgattactgaccgttctggtcgcccgttagcggtgagcgtgccggtaaaagcgatttgggctgacccgaaagaagtgcatgacgctggcggtatcagcgtcggtgaccgctggaaggcgctggctaacgcgctcaatattccgctggatcagcttagtgcccgcattaacgccaacccgaaagggcgctttatttatctggcgcgtcaggtgaaccctgacatggcggactacatcaaaaaactgaaactgccggggattcatctgcgtgaagagtctcgccgttactatccgtccggcgaagtgactgctcacctcatcggctttactaacgtcgatagtcaagggattgagggcgttgagaagagtttcgataaatggcttaccgggcagccgggtgagcgcattgtgcgtaaagaccgctatggtcgcgtaattgaagatatttcttctactgacagccaggcagcgcacaacctggcgctgagtattgatgaacgcctgcaggcgctggtttatcgcgaactgaacaacgcggtggcctttaacaaggctgaatctggtagcgccgtgctggtggatgtcaacaccggtgaagtgctggcgatggctaacagcccgagttacaaccctaacaatctgagcggcacgccgaaagaggcgatgcgtaaccgtaccatcaccgacgtgtttgaaccgggcagtacggttaaaccgatggtggtaatgaccgcgttgcaacgtggcgtggtgcgggaaaacagcgtactcaataccattccttatcgaattaacggccacgaaatcaaagacgtggcacgctacagcgaattaaccctgaccggggtattacagaagagcagtaacgtcggtgtttccaagctggcgttagcgatgccgtccagtgcgttagtagatacttacagtcgttttggactgggaaaagcgaccaatttggggttggtcggagaacgcagtggcttatatcctcaaaaacaacggtggtctgacatagagagggccaccttctctttcggctacgggctaatggtaacaccattacagttagcgcgagtctacgcaactatcggcagctacggcatttatcgcccactgagcattaccaaagttgaccccccggttcccggtgaacgtgtcttcccggaatccattgtccgcactgtggtgcatatgatggaaagcgtggcgctaccaggcggcggcggcgtgaaggcggcgattaaaggctatcgtatcgccattaaaaccggtaccgcgaaaaaggtcgggccggacggtcgctacatcaataaatatattgcttataccgcaggcgttgcgcctgcgagtcagccgcgcttcgcgctggttgttgttatcaacgatccgcaggcgggtaaatactacggcggcgccgtttccgcgccggtctttggtgccatcatgggcggcgtattgcgtaccatgaacatcgagccggatgcgctgacaacgggcgataaaaatgaatttgtgattaatcaaggcgaggggacaggtggcagaagctaaagcctgagcgcttcgcgctggttgttgttatcaacgatccgcaggcgggtaaatactacggcggcgccgtttccgcgccggtctttggtgccatcatgggcggcgtattgcgtaccatgaacatcgagccggatgcgctgacaacgggcgataaaaatgaatttgtgattaatcaaggcgaggggacaggtggcagatcgtaatttgcgcgaccttcttgctccgtgggtgccagacgcacctagccgagcactgcgagagatgacactcgacagccgtgtggctgcggcgggcgatctctttgtagctgtagtaggtcatcaggcggacgggcgtcgatatatcccgcaggcgatagcgcaaggtgtggctgccattattgcagaggcgaaagatgaggcgaccgatggtgaaatccgtgaaatgcacggcgtaccggtcatctatctcagccagctcaacgagcgtttatctgcactggcgggccgcttttaccatgaaccctctgacaatttacgtctcgtgggcgtaacgggcaccaacggcaaaaccacgactacccagctgttggcgcagtggagccaactgcttggcgaaatcagcgcggtaatgggcaccgttggtaacggcctgctggggaaagtgatcccgacagaaaatacaaccggtagcgcagtcgatgttcagcatgagctggcggggctggtggatcagggcgcgacgttttgcgcaatggaagtttcctcccacgggctggtacagcaccgtgtggcggcattgaaatttgcggcgagcgtctttaccaacttaagccgcgatcaccttgattatcatggtgatatggaacactacgaagccgcgaaatggctgctttattctgagcatcattgcggtcaggcgattattaacgccgacgatgaagtgggccgccgctggctggcaaaactgccggacgcggttgcggtaagtatggaagatcatattaatccgaactgtcacggacgctggttgaaagcgaccgaagtgaactatcacgacagcggtgcgacgattcgctttagcagtagttggggcgatggcgaaattgaaagccatctgatgggcgcttttaacgtcagcaacctgctgctcgcgctggcgacactgttggcactcggctatccactggctgatctgctgaaaaccgccgcgcgtctgcaaccggtttgcggacgtatggaagtgttcactgcgccaggcaaaccgacggtggtggtggattacgcgcatacgccggatgcactggaaaaagccttacaggcggcgcgtctgcactgtgcgggcaagctgtggtgtgtctttggctgtggtggcgatcgcgataaaggtaagcgtccactgatgggcgcaattgccgaagagtttgctgacgtggcggtggtgacggacgataacccgcgtaccgaagaaccgcgtgccatcatcaacgatattctggcgggaatgttagatgccggacatgccaaagtgatggaaggccgtgctgaagcggtgacttgcgccgttatgcaggctaaagagaatgatgtggtactggtcgcgggcaaaggccatgaagattaccagattgttggcaatcagcgtctggactactccgatcgcgtcacggtggcgcgtctgctgggggtgattgcatgattagcgtaacccttagccaacttaccgacattctcaacggtgaactgcaaggtgcagatatcacccttgatgctgtaaccactgatacccgaaaactgacgccgggctgcctgtttgttgccctgaaaggcgaacgttttgatgcccacgattttgccgaccaggcgaaagctggcggcgcaggcgcactactggttagccgtccgctggacatcgacctgccgcagttaatcgtcaaggatacgcgtctggcgtttggtgaactggctgcatgggttcgccagcaagttccggcgcgcgtggttgctctgacggggtcctccggcaaaacctccgttaaagagatgacggcggcgattttaagccagtgcggcaacacgctttatacggcaggcaatctcaacaacgacatcggtgtaccgatgacgctgttgcgcttaacgccggaatacgattacgcagttattgaacttggcgcgaaccatcagggcgaaatagcctggactgtgagtctgactcgcccggaagctgcgctggtcaacaacctggcagcggcgcatctggaaggttttggcagccttgcgggtgtcgcgaaagcgaaaggtgaaatctttagcggcctgccggaaaacggtatcgccattatgaacgccgacaacaacgactggctgaactggcagagcgtaattggcagtcgcaaagtgtggcgtttcagtcccaatgccgccaacagcgatttcaccgccaccaatatccatgtgaccagccacggtacggaatttaccctacaaaccccaaccggtagcgtcgatgttctgctgccgttgccggggcgtcacaatattgcgaatgcgctggcagccgctgcgctctccatgtccgtgggcgcaacgcttgatgctatcaaagcggggctggcaaatctgaaagctgttccaggccgtctgttccccatccaactggcagaaaaccagttgctgctcgacgactcctacaacgccaatgtcggtagtatgactgcagcagtccaggtactggctgaaatgccgggctaccgcgtgctggtggtgggcgatatggcggaactgggcgctgaaagcgaagcctgccatgtacaggtgggcgaggcggcaaaagctgctggtattgaccgcgtgttaagcgtgggtaaacaaagccatgctatcagcaccgccagcggcgttggcgaacattttgctgataaaactgcgttaattacgcgtcttaaattactgattgctgagcaacaggtaattacgattttagttaagggtagtcgtagtgccgccatggaagaggtagtacgcgctttacaggagaatgggacatgttaatataagctttacaggagaatgggacatgttagtttggctggccgaacatttggtcaaatattattccggctttaacgtcttttcctatctgacgtttcgcgccatcgtcagcctgctgaccgcgctgttcatcagtttgtggatgggcccgcgtatgattgctcatttgcaaaaactttcctttggtcaggtggtgcgtaacgacggtcctgaaagtcacttcagcaagcgcggtacgccgaccatgggcgggattatgatcctgacggcgattgtgatctccgtactgctgtgggcttacccgtccaatccgtacgtctggtgcgtgttggtggtgctggtaggttacggtgttattggctttgttgatgattatcgcaaagtggtgcgtaaagacaccaaagggttgatcgctcgttggaagtatttctggatgagcgtcattgcgctgggtgtcgccttcgccctgtaccttgccggcaaagacacgcccgcaacgcagctggtggtcccattctttaaagatgtgatgccgcagctggggctgttctacattctgctggcttacttcgtcattgtgggtactggcaacgcggtaaacctgaccgatggtctcgacggcctggcaattatgccgaccgtatttgtcgccggtggttttgcgctggtggcgtgggcgaccggcaatatgaactttgccagctacttgcatataccgtatctgcgacacgccggggaactggttattgtctgtaccgcgatagtcggggcaggactgggcttcctgtggtttaacacctatccggcgcaggtctttatgggcgatgtaggtagcctggcgttaggtggtgcgttaggcattatcgccgtactgctacgtcaggaattcctgctggtgattatggggggcgtgttcgtggtagaaacgctttctgtcatcctgcaggtcggctcctttaaactgcgcggacaacgtattttccgcatggcaccgattcatcaccactatgaactgaaaggctggccggaaccgcgcgtcattgtgcgtttctggattattagcctgatgctggttctgattggtctggcaacgctgaaggtacgttaatcatggctgattatcagggtaaaaatgtcgtcattatcggcctgggcctcaccgggctttcctgcgtggactttttcctcgctcgcggtgtgacgccgcgcgttatggatacgcgtatgacaccgcctggcctggataaattacccgaagccgtagaacgccacacgggcagtctgaatgatgaatggctgatggcggcagatctgattgtcgccagtcccggtattgcactggcgcatccatccttaagcgctgccgctgatgccggaatcgaaatcgttggcgatatcgagctgttctgtcgcgaagcacaagcaccgattgtggcgattaccggttctaacggcaaaagcacggtcaccacgctagtgggtgaaatggcgaaagcggcgggggttaacgttggtgtgggtggcaatattggcctgcctgcgttgatgctactggatgatgagtgtgaactgtacgtgctggaactgagcagcttccagctggaaaccacctccagcttacaggcggtagcagcgaccattctgaacgtgactgaagatcatatggatcgctatccgtttggtttacaacagtatcgtgcagcaaaactgcgcatttacgaaaacgcgaaagtttgcgtggttaatgctgatgatgccttaacaatgccgattcgcggtgcggatgaacgctgcgtcagctttggcgtcaacatgggtgactatcacctgaatcatcagcagggcgaaacctggctgcgggttaaaggcgagaaagtgctgaatgtgaaagagatgaaactttccgggcagcataactacaccaatgcgctggcggcgctggcgctggcagatgctgcagggttaccgcgtgccagcagcctgaaagcgttaaccacattcactggtctgccgcatcgctttgaagttgtgctggagcataacggcgtacgttggattaacgatagcaaagcgaccaacgtcggcagtacggaagcggcgctgaatggcctgcacgtagacggcacactgcatttgttgctgggtggcgatggtaaaagcgcggactttagcccactggcgcgttacctgaatggcgataacgtacgtctgtattgtttcggtcgtgacggcgcgcagctggcggcgctacgcccggaagtggcagaacaaaccgaaactatggaacaggcgatgcgcttgctggctccgcgtgttcagccgggcgatatggttctgctctccccagcctgtgccagccttgatcagttcaagaactttgaacaacgaggcaatgagtttgcccgtctggcgaaggagttaggttgatgcgtttatctctccctcgcctgaaaatgccgcgcctgccaggattcagtatcctggtctggatctccacggcgctaaagggctgggtgatgggcagccgggaaaaagataccgacagcctgatcatgtacgatcgcaccttactgtggctgaccttcggcctcgcggcgattggctttatcatggtgaccagcgcgagtatgcccatagggcaacgcttaaccaacgatccgttcttcttcgcgaagcgtgatggtgtctatctgattttggcgtttattctggcgatcattacgctgcgtctgccgatggagttctggcaacgctacagtgccacgatgctgctcggatctatcatcctgctgatgatcgtcctggtagtgggtagcagcgttaaaggggcaagccgttggatcgatctcggtttgctgcgtatccagcctgcggagctgacaaaactgagcctgttttgctatatcgccaactatctggtgcgtaaaggcgacgaagtacgtaataacctgcgcggcttcctgaaaccgatgggcgtgattctggtgttggcagtgttactgctggcacagccagaccttggtacggtggtggtgttgtttgtgactacgctggcgatgttgttcctggcgggagcgaaattgtggcagttcattgccattatcggtatgggcattagtgcggttgtgttgctgatactcgccgaaccgtaccgtatccgccgtgttaccgcattctggaacccgtgggaagatccctttggcagcggctatcagttaacgcaaagcctgatggcgtttggtcgcggcgaactttgggggcaaggtttaggtaacagcgtacaaaaactggagtatctgccggaagcgcacactgactttattttcgccattatcggcgaagaactggggtatgtcggtgtggtgctggcacttttaatggtattcttcgtcgcttttcgcgcgatgagcattggccgtaaagcattagaaattgaccaccgtttttccggttttctcgcctgttctattggcatctggtttagcttccaggcgctggttaacgtaggcgcggcggcggggatgttaccgaccaaaggtctgacattgccgctgatcagttacggtggtagcagcttactgattatgagcacagccatcatgatgctgttgcgtattgattatgaaacgcgtctggagaaagcgcaggcgtttgtacgaggtagtcgatgagtggtcaaggaaagcgattaatggtgatggcaggcggaaccggtggacatgtattcccgggactggcggttgcgcaccatctaatggctcagggttggcaagttcgctggctggggactgccgaccgtatggaagcggacttagtgccaaaacatggcatcgaaattgatttcattcgtatctctggtctgcgtggaaaaggtataaaagcactgatagctgccccgctgcgtatcttcaacgcctggcgtcaggcgcgggcgattatgaaagcgtacaaacctgacgtggtgctcggtatgggaggctacgtgagtggtccaggtggtctggccgcgtggagcttaggcattccggttgtacttcatgaacaaaacggtattgcgggcttaaccaataaatggctggcgaagattgccaccaaagtgatgcaggcgtttccaggtgctttccctaatgcggaagtagtgggtaacccggtgcgtaccgatgtgttggcgctgccgttgccgcagcaacgtttggctggacgtgaaggtccggttcgtgtgctggtagtgggtggttctcagggcgcacgcattcttaaccagacaatgccgcaggttgctgcgaaactgggtgatagtgtcactatctggcatcagagcggcaaaggtagccaacaatccgttgaacaggcgtatgccgaagcggggcaaccgcagcataaagtgacggaatttattgatgatatggcggcggcgtatgcgtgggcggatgtcgtcgtttgccgctccggtgcgttaacggtgagtgaaatcgccgcggcaggactaccggcgttgtttgtgccgtttcaacataaagaccgccagcaatactggaatgcgctaccgctggaaaaagcgggcgcagccaaaattatcgagcagccacagcttagcgtggatgctgtcgccaacaccctggccgggtggagccgagaaaccttattaaccatggcagaacgcgcccgcgctgcatccattccggatgccaccgagcgagtggcaaatgaagtgagccgggttgcccgggcgtaattgtagcgatgccttttgcatcgtatgaatttaagaagttaatggcgtaaagaatgaatacacaacaattggcaaaactgcgttccatcgtgcccgaaatgcgtcgcgttcggcacatacattttgtcggcattggtggtgccggtatgggcggtattgccgaagttctggccaatgaaggttatcagatcagtggttccgatttagcgccaaatccggtcacgcagcagttaatgaatctgggtgcgacgatttatttcaaccatcgcccggaaaacgtacgtgatgccagcgtggtcgttgtttccagcgcgatttctgccgataacccggaaattgtcgccgctcatgaagcgcgtattccggtgatccgtcgtgccgaaatgctggctgagttaatgcgttttcgtcatggcatcgccattgccggaacgcacggcaaaacgacaaccaccgcgatggtttccagcatctacgcagaagcggggctcgacccaaccttcgttaacggcgggctggtaaaagcggcgggggttcatgcgcgtttggggcatggtcggtacctgattgccgaagcagatgagagtgatgcaagcttcctgcatctgcaaccgatggtggcgattgtcaccaatatcgaagccgaccacatggatacctaccagggcgactttgagaatttaaaacagacttttattaattttctgcacaacctgccgttttacggtcgtgcggtgatgtgtgttgatgatccggtgatccgcgaattgttaccgcgagtggggcgtcagaccacgacttacggcttcagcgaagatgccgacgtgcgtgtagaagattatcagcagattggcccgcaggggcactttacgctgctgcgccaggacaaagagccgatgcgcgtcaccctgaatgcgccaggtcgtcataacgcgctgaacgccgcagctgcggttgcggttgctacggaagagggcattgacgacgaggctattttgcgggcgcttgaaagcttccaggggactggtcgccgttttgatttcctcggtgaattcccgctggagccagtgaatggtaaaagcggtacggcaatgctggtcgatgactacggccaccacccgacggaagtggacgccaccattaaagcggcgcgcgcaggctggccggataaaaacctggtaatgctgtttcagccgcaccgttttacccgtacgcgcgacctgtatgatgatttcgccaatgtgctgacgcaggttgataccctgttgatgctggaagtgtatccggctggcgaagcgccaattccgggagcggacagccgtagcctgtgtcgcacaattcgtggacgtgggaaaattgatcccattctggtgccggatccggcgcgggtagccgagatgctggcaccggtattaaccggtaacgacctgattctcgttcagggggctggtaatattggaaaaattgcccgttctttagctgaaatcaaactgaagccgcaaactccggaggaagaacaacatgactgataaaatcgcggtcctgttgggtgggacctccgctgagcgggaagtttctctgaattctggcgcagcggtgttagccggactgcgtgaaggcggtattgacgcgtatcctgtcgacccgaaagaagtcgacgtgacgcaactgaagagcatgggctttcagaaagtgtttatcgcgctacacggtcgcggcggtgaagatggtacgctgcaggggatgctcgagctgatgggcttgccttataccggaagcggagtgatggcatctgcgcttagtatggataaactacgcagcaaacttctatggcaaggtgccggtttaccggtcgcgccgtgggtagcgttaacccgcgcagagtttgaaaaaggcctgagcgataagcagttagcagaaatttctgctctgggtttgccggttatcgttaagccgagccgcgaaggttccagtgtgggaatgagtaaagtagtagcagaaaatgctctacaagatgcattaagattggcatttcagcacgatgaagaagtattgattgaaaaatggctaagtgggccggagttcacggttgcgatactcggtgaagaaattttaccgagtatacgtattcaaccgtccggaaccttctatgattatgaggcgaagtatctctctgatgagacacagtatttctgccccgcaggtctggaagcgagtcaagaggccaatttgcaggcattagtgctgaaagcatggacgacgttaggttgcaaaggatggggacgtattgacgttatgctggacagcgatggacagttttatctgctggaagccaataccagtccgggtatgaccagccacagcctggtgccgatggcggcacgtcaggcaggtatgagcttcagccagttggtagtacgaattctggaactggcggactaatatgagccaggctgctctgaacacgcgaaacagcgaagaagaggtttcttctcgccgcaataatggaacgcgtctggcggggatccttttcctgctgaccgttttaacgacagtgttggtgagcggctgggtcgtgttgggctggatggaagatgcgcaacgcctgccgctcagtaagctggtgttgaccggtgaacgccattacacacgtaatgacgatatccggcagagcatcctggcattgggtgagccgggtacctttatgacccaggatgtcaacatcatccagacgcaaatagaacaacgcctgccgtggattaagcaggtgagcgtcagaaagcagtggcctgatgaattgaagattcatctggttgaatatgtgccgattgcgcggtggaatgatcaacatatggtagacgcggaaggaaataccttcagcgtgccgccagaacgcaccagcaagcaggtgcttccaatgctgtatggcccggaaggcagcgccaatgaagtgttgcagggctatcgcgaaatggggcagatgctggcaaaggacagatttactctgaaggaagcggcgatgaccgcgcggcgttcctggcagttgacgctgaataacgatattaagctcaatcttggccggggcgatacgatgaaacgtttggctcgctttgtagaactttatccggttttacagcagcaggcgcaaaccgatggcaaacggattagctacgttgatttgcgttatgactctggagcggcagtaggctgggcgcccttgccgccagaggaatctactcagcaacaaaatcaggcacaggcagaacaacaatgatcaaggcgacggacagaaaactggtagtaggactggagattggtaccgcgaaggttgccgctttagtaggggaagttctgcccgacggtatggtcaatatcattggcgtgggcagctgcccgagccgtggtatggataaaggcggggtgaacgacctcgaatccgtggtcaagtgcgtacaacgcgccattgaccaggcagaattgatggcagattgtcagatctctagcgtatatctggcgctttctggtaagcacatcagctgccagaatgaaattggtatggtgcctatttctgaagaagaagtgacgcaagaagatgtggaaaacgtcgtccataccgcgaaaagcgtgcgtgtgcgcgatgagcatcgtgtgctgcatgtgatcccgcaagagtatgcgattgactatcaggaagggatcaagaatccggtaggacttagcggcgtgcggatgcaggcaaaagtgcacctgatcacatgtcacaacgatatggcgaaaaacatcgtcaaagcggttgaacgttgtgggctgaaagttgaccaactgatatttgccggactggcaagtagttatagcgtattgacggaagatgaacgtgaactgggtgtctgcgtcgtcgatatcggtggtggtacaatggatatcgccgtttataccggtggggcattgcgccacactaaggtaattccttatgctggcaatgtcgtgaccagtgatatcgcttacgcctttggcacgccgccaagcgacgccgaagcgattaaagttcgccacggttgtgcgctgggttccatcgttggaaaagatgagagcgtggaagtgccgagcgtaggtggtcgtccgccacggagtctgcaacgtcagacactggcagaggtgatcgagccgcgctataccgagctgctcaacctggtcaacgaagagatattgcagttgcaggaaaagcttcgccaacaaggggttaaacatcacctggcggcaggcattgtattaaccggtggcgcagcgcagatcgaaggtcttgcagcctgtgctcagcgcgtgtttcatacgcaagtgcgtatcggcgcgccgctgaacattaccggtttaacggattatgctcaggagccgtattatagcacggcggtgggattgcttcactatgggaaagagagtcatcttaacggtgaagctgaagtagaaaaacgtgttacagcaagtgttggcagctggatcaagcgactcaatagttggctgcgaaaagagttttaatttttatgaggccgacgatgattacggcctcaggcgacaggcacaaatcggagagaaactatgtttgaaccaatggaacttaccaatgacgcggtgattaaagtcatcggcgtcggcggcggcggcggtaatgctgttgaacacatggtgcgcgagcgcattgaaggtgttgaattcttcgcggtaaataccgatgcacaagcgctgcgtaaaacagcggttggacagacgattcaaatcggtagcggtatcaccaaaggactgggcgctggcgctaatccagaagttggccgcaatgcggctgatgaggatcgcgatgcattgcgtgcggcgctggaaggtgcagacatggtctttattgctgcgggtatgggtggtggtaccggtacaggtgcagcaccagtcgtcgctgaagtggcaaaagatttgggtatcctgaccgttgctgtcgtcactaagcctttcaactttgaaggcaagaagcgtatggcattcgcggagcaggggatcactgaactgtccaagcatgtggactctctgatcactatcccgaacgacaaactgctgaaagttctgggccgcggtatctccctgctggatgcgtttggcgcagcgaacgatgtactgaaaggcgctgtgcaaggtatcgctgaactgattactcgtccgggtttgatgaacgtggactttgcagacgtacgcaccgtaatgtctgagatgggctacgcaatgatgggttctggcgtggcgagcggtgaagaccgtgcggaagaagctgctgaaatggctatctcttctccgctgctggaagatatcgacctgtctggcgcgcgcggcgtgctggttaacatcacggcgggcttcgacctgcgtctggatgagttcgaaacggtaggtaacaccatccgtgcatttgcttccgacaacgcgactgtggttatcggtacttctcttgacccggatatgaatgacgagctgcgcgtaaccgttgttgcgacaggtatcggcatggacaaacgtcctgaaatcactctggtgaccaataagcaggttcagcagccagtgatggatcgctaccagcagcatgggatggctccgctgacccaggagcagaagccggttgctaaagtcgtgaatgacaatgcgccgcaaactgcgaaagagccggattatctggatatcccagcattcctgcgtaagcaagctgattaagaattgactggaatttgggtttcgaggctctttgtgctaaactggcccgccgaatgtatagtacacttcggttggataggtaatttggcgagataatacgatgatcaaacaaaggacacttaaacgtatcgttcaggcgacgggtgtcggtttacataccggcaagaaagtcaccctgacgttacgccctgcgccggccaacaccggggtcatctatcgtcgcaccgacttgaatccaccggtagatttcccggccgatgccaaatctgtgcgtgataccatgctctgtacgtgtctggtcaacgagcatgatgtacggattagtaccgtagagcacctcaatgctgctctcgcgggcttgggcatcgataacattgttatcgaagttaacgcgccggaaatcccgatcatggacggcagcgccgctccgtttgtatacctgctgcttgacgccggtatcgacgagttgaactgcgccaaaaaatttgttcgcatcaaagagactgttcgtgtcgaagatggcgataagtgggctgaatttaagccgtacaatggttttagcctggatttcaccatcgattttaaccatccggctattgattccagcaaccagcgctatgcgatgaacttctccgctgatgcgtttatgcgccagatcagccgtgcgcgtacgttcggtttcatgcgtgatatcgaatatctgcagtcccgtggtttgtgcctgggcggcagcttcgattgtgccatcgttgttgacgattatcgcgtactgaacgaagacggcctgcgttttgaagacgaatttgtgcgtcacaaaatgctcgatgcgatcggtgacttgttcatgtgtggtcacaatattattggtgcatttaccgcttataaatccggtcatgcactgaataacaaactgctgcaggctgtcctggcgaaacaggaagcctgggaatatgtgaccttccaggacgacgcagaactgccgttggccttcaaagcgcctagtgctgtactggcataacgacatttatactgtcgtataaaattcgactggcaaatctggcactctctccggccaggtgaaccagtcgtttttttttgaattttataagagctataaaaaacggtgcgaacgctgttttcttaagcacttttccgcacaacttatcttcattcgtgctgtggactgcaggctttaatgataagatttgtgcgctaaatacgtttgaatatgatcgggatggcaataacgtgagtggaatactgacgcgctggcgacagtttggtaaacgctacttctggccgcatctcttattagggatggttgcggcgagtttaggtttgcctgcgctcagcaacgccgccgaaccaaacgcgcccgcaaaagcgacaacccgcaaccacgagcctagtgccaaagttaactttggtcaattggccttgctggaagcgaacacacgccgcccgaatagcaactattccgttgattactggcatcaacatgccattcgcacggtaatccgtcatctttctttcgcaatggcaccgcaaacactgcccgttgctgaagaatctttgcctcttcaggcgcaacatcttgcattactggatacgctcagcgcgctgctgacccaggaaggcacgccgtctgaaaagggttatcgcattgattatgcgcattttaccccacaagcaaaattcagcacgcccgtctggataagccaggcgcaaggcatccgtgctggccctcaacgcctcacctaacaacaataaacctttacttcattttattaactccgcaacgcggggcgtttgagattttattatgctaatcaaattgttaactaaagttttcggtagtcgtaacgatcgcaccctgcgccggatgcgcaaagtggtcaacatcatcaatgccatggaaccggagatggaaaaactctccgacgaagaactgaaagggaaaaccgcagagtttcgtgcacgtctggaaaaaggcgaagtgctggaaaatctgatcccggaagctttcgccgtggtacgtgaggcaagtaagcgcgtctttggtatgcgtcacttcgacgttcagttactcggcggtatggttcttaacgaacgctgcatcgccgaaatgcgtaccggtgaaggaaaaaccctgaccgcaacgctgcctgcttacctgaacgcactaaccggtaaaggcgtgcacgtagttaccgtcaacgactacctggcgcaacgtgacgccgaaaacaaccgtccgctgtttgaattccttggcctgactgtcggtatcaacctgccgggcatgccagcaccggcaaagcgcgaagcttacgcagctgacatcacttacggtacgaacaacgaatacggctttgactacctgcgcgacaacatggcgttcagccctgaagaacgtgtacagcgtaaactgcactatgcgctggtggacgaagtggactccatcctgatcgatgaagcgcgtacaccgctgatcatttccggcccggcagaagacagcagcgaaatgtataaacgcgtgaataaaattattccgcacctgatccgtcaggaaaaagaagactccgaaaccttccagggcgaaggccacttcagcgtggacgaaaaatctcgccaggtgaacctgaccgaacgtggtctggtgctgattgaagaactgctggtgaaagagggcatcatggatgaaggggagtctctgtactctccggccaacatcatgctgatgcaccacgtaacggcggcgctgcgcgctcatgcgctgtttacccgtgacgtcgactacatcgttaaagatggtgaagttatcatcgttgacgaacacaccggtcgtaccatgcagggccgtcgctggtccgatggtctgcaccaggctgtggaagcgaaagaaggtgtgcagatccagaacgaaaaccaaacgctggctagcatcaccttccagaactacttccgtctgtatgaaaaactggcggggatgaccggtactgctgataccgaagctttcgaatttagcagtatctacaagctggataccgtcgttgttccgaccaaccgtccaatgattcgtaaagatctgccggacctggtctacatgactgaagcggaaaaaattcaggcgatcattgaagatatcaaagaacgtactgcgaaaggccagccggtgctggtgggtactatctccatcgaaaaaagcgagctggtgagtaacgaactgaccaaagccggtattaagcacaacgtcctgaacgccaaattccacgccaacgaagcggcgattgttgctcaggcaggttatccggctgcggtgactatcgcgaccaatatggcgggtcgtggtacagatattgtgctcggtggtagctggcaggcagaagttgccgcgctggaaaatccgaccgcagagcaaattgaaaaaattaaagccgactggcaggtacgtcacgatgcggtactggaagcaggtggcctgcatatcatcggtaccgagcgtcacgaatcccgtcgtatcgataaccagttgcgcggtcgttctggtcgtcagggggatgctggttcttcccgtttctacctgagcatggaagatgcgctgatgcgtatttttgcttccgaccgagtatccggcatgatgcgtaaactgggtatgaagccaggcgaagccattgaacacccgtgggtgactaaagcgattgccaacgcccagcgtaaagttgaaagccgtaacttcgacattcgtaagcaactgctggaatatgatgacgtggctaacgatcagcgtcgcgccatttactcccagcgtaacgaactgttggatgtcagcgatgtgagcgaaaccattaacagcattcgtgaagatgtgttcaaagcgaccattgatgcctacattccaccacagagcctggaagaaatgtgggatattccggggctgcaggaacgtctgaagaacgatttcgacctcgatttgccaattgccgagtggctggataaagaaccagaactgcatgaagagacgctgcgtgagcgcattctggcgcagtccatcgaagtgtatcagcgtaaagaagaagtggttggtgctgagatgatgcgtcacttcgagaaaggcgtcatgctgcaaacgcttgactccctgtggaaagagcacctggcagcgatggactatctgcgtcagggtatccacctgcgtggctacgcacagaaagatccgaagcaggaatacaaacgtgaaagcttctccatgtttgcagcgatgctggagagcttgaaatatgaagttatcagtacgctgagcaaagttcaggtacgtatgcctgaagaggttgaggagctggaacaacagcgtcgtatggaagccgagcgtttagcgcaaatgcagcagcttagccatcaggatgacgactctgcagccgcagctgcactggcggcgcaaaccggagagcgcaaagtaggacgtaacgatccttgcccgtgcggttctggtaaaaaatacaagcagtgccatggccgcctgcaataaaagctaactgttgaagtaaaaggcgcaggattctgcgccttttttataggtttaagacaatgaaaaagctgcaaattgcggtaggtattattcgcaacgagaacaatgaaatctttataacgcgtcgcgcagcagatgcgcacatggcgaataaactggagtttcccggcggtaaaattgaaatgggtgaaacgccggaacaggcggtggtgcgtgaacttcaggaagaagtcgggattaccccccaacattttagcctatttgaaaaactggaatatgaattcccggacaggcatataacactgtggttttggctggtcgaacgctgggaaggggagccgtggggtaaagaagggcaacccggtgagtggatgagcctggtcggtcttaatgccgatgattttccgccagccaatgaaccggtaattgcgaagcttaaacgtctgtaagtcagataaggcgttttcgccgcatccgacattcgcacacgatgcctgatgcgacgctggcgcgtcttatcaggcctaaagggatttctaactcattgataaatttgtttttgtaggtcggataaggcgttcacgccgcatccgacatttgcacaagatgcctgatgcgacgctgtccgcgtcttatcaggcctacgtgcggcatcagacaaatgtcactgctttggttcttcgctccagtcatcgctttcggaaagatcgccactgctggggattcgtttttcttcagcagcccattctccgaggtcgatcagctgacaacgtttggagcaaaatggccgaaacgggctgatttcaccccacaccaccgttttcccgcaggttgggcaattcaccgtaatagtttcactcatttttactccttagcaacaggccagttcgaaatccagacgttccggtacctgtccgttttcagtgtccagcggcataaaacgaatggcaaaacggctcttatgtccggaaatttgcggataaagctgactatcgaggctcagattcaggcgcagcaagtcggcatcgccaccgttatcctgataaaaaccattcaggctggtttgtttacggaagggggcgctctggcgaattaaatccagcaccatggtaagtgcctgggtgagcgggttcaggctggcaatccaggtttctacctggctgtcgcgctgcgcctggggtagatgcagccaaatgtgcaatgtaggtaaatcaaagctgcaacagccgcctgggatgctcagtcgctgacgcaccagagcaatcaaacgatcttcacgcagaaattgcccgatacgcggcgcggaaattaatacgctccccgccgcttttaactgctgaattaatgcttcaatacggctctggtccacgccaggcacgccaatccaggtctggagtttacgttgctgccggtcaagttctttcaacagctcagtgcggacttcgccgcgctcgaaaacatccagtaattcactgacattacggaagaaatgcagcgcgccagcgtggtcaacgatgggtaaattaacggtgagttgctgaatcaaaaactcaatgcgcagccatgtacgcattttttcatttagtggatgttcaaaaaggacctgggtctgcattacggtttttcctgactgacaaactggctcgcaagctgcaaatagtgtgcgtgcaggcgggcaacatcgcttgcgatagcatccggtgcgccgttattatcaatgacgtcatctgccacggcaaggcgggcttcgcgcgttgcctgagcagcaaggatttgttcgacatgctcgcgagttacatcatcgcgctgcatggtgcgcttaagttgcgtttctgggctgacatccaccacaagcactcgattcgcttttttatacagactgttttctaccagcaatggcacaacccacagtacatagggggaagtagcttgctggatctggtgttgcgtctcttgctgaatcagcggatgcagcagggcgttaagccagtttttctcttccgggttggcgaagatccgctcgcgcaaggcccggcgctgcaatgttccatcagcagcaatcatgttagcgccaaagtgatcagcaatggcatgtagcgcaggtgcacctggttcaaccacctgacgcgcaataatatcggcatcaatgacgttaattccgagatcagcaaacgcattggcaacggtactcttgccactgccaatgcctcccgttaaggcaactatatacctcataatttatattcccgggaattcatcatgattatcaaaacgttaaaaatgagtgcacgaaagcgaaattgatgaaacgttcgctcactatttaccaggtaaatttatgggattgtagcgtaaaaaaagacaatttcgcagtcttgcgccgcattgattagtgcgtatgatagcgtcactggagttgcgctcttacccttatagccattaaccccaggaatccgcacatgcgtattgaagaagatctgaagttaggttttaaagacgttctcatccgccctaaacgctccactcttaaaagccgttccgatgttgaactggaacgtcaattcaccttcaaacatagtggtcagagctggtccggcgtgccgattatcgccgcaaatatggacaccgtaggcacattttctatggcctctgcgctggcttcttttgatattttgactgctgtgcataaacactattctgtcgaagagtggcaagcgtttatcaacaattcttccgctgatgtgctgaaacatgtgatggtttctaccggtacgtctgatgcggatttcgaaaaaactaaacagattctcgacctgaacccggcattaaacttcgtttgtattgacgtggcgaatggttattccgaacacttcgtgcagttcgttgcgaaagcgcgtgaagcgtggccgaccaaaaccatttgtgctggtaacgtagtgactggtgaaatgtgtgaggagcttatcctcagtggtgccgatatcgttaaagttggcattggcccaggttctgtttgtacaactcgcgtcaaaacaggcgtcggttatccgcaactttctgcggtaatcgaatgtgccgatgctgcgcacggtctgggcggaatgatcgtcagcgatggtggctgcaccacgccgggcgatgtggcgaaagcctttggcggcggtgccgatttcgtcatgcttggcggcatgctggcgggccacgaagagagcggcggtcgcatcgttgaggagaacggcgagaaatttatgctgttctacggcatgagctccgagtctgcgatgaaacgtcacgttggcggcgttgcggaatatcgcgcagcagaaggtaaaaccgttaagctgccgctgcgaggcccggttgaaaataccgcgcgagatattttgggcggcctgcgtagtgcttgtacatacgttggggctagtcgcctgaaagagctgaccaagcgcaccacgtttattcgtgtgcaggaacaagaaaaccgcatcttcaacaacctgtaatctcccaacgctggcgtggagcaacacgccagcgttatcccatcccactcatcgcatcgcctaaatggaaaattggcagatacattgccaccaccagcgtaccaataattcctcccgttatgatcagcaacgccggttccagtaaggctgcgaggttatccgccagcgccattgtgttttcccgatgatgatgggcgaggttgtctaacatgagatccagagagccggatgcctctcctgttctcactaattgcaaacagagcgggctaaactcaccggtattttttagcgccagccagatgggttgaccgttactgatatcgtgctggatttgtgtcagaagttgcacccagtacgggcagcgcattgtttctctgacgctctctacgccctgtaaaaaagtaatgcctgcactttgtgtcagcgccagaatcgtaaagatctgcgtgagtttttgtccccgcatcagactacccataatcgggatgcgtaacagcaatttctgccgcactataagccaggtcggtcggcgcatcagcaacttattggctatcgccagcagaaagccgaacaacaccagcagccagctccattcgccactaaagtctgccagcgtcatgatcccctgcgttagtgccggtagtggggtgttgaaggtcttatagatagcggcaaactccggcagaacaaaatgcagcattgccacaaccaccatgattgccatcgctaaaatgatgatgggataacgtaacgcacttttcactttgtcggtcaactgacgctgggctttttgctgacgcgccagttcaaagcagcattcatccagcttaccggtcagttcacccgtgcggatcatcgcctgatagagcggcggaaatacctcactccagggtaataaggcattggaaaaagcaatgccctgttcgagatcgtgcgccaggctttgcagcaacgcttgccattgcttactgggatgctgttccgccagcagagccagcccttcagaaagcgttaaccctgctttgagtagcgtcgccagttgatgaatgacttccgcgcttttatctcctcgccactgcgcagaattgatggcgattcgcttcaggcttagtggggtaaccatctgttgctgtagtgccataagcagtaaagtacggctctctgcccatagcatcccatcttgcgcattgccgtcgccggttatgccatgccagcgccagagttgcttactcgccatgcggcatccccagtacgcggattaactcttcaaaggtggttaagccttgctctacggccaggcagccgttttcaaaaagcgtacgcatacccgcctgtcgtgcgtgcgtttccaggctttcaacgtcggtattagcggaaataagctgacgaatgaccggcgttatgggcagaacttcaaataaggccgtacgaccataaaaaccgtggtagcaatgtacacaaccgggtgcctgccagtggggcagcgggcttggccatacattgtctggaatgtggatgggctccccttgctgccggcgacaatgtgggcaaagtttgcgtaccagacgctgggctattaccagcgtaagcgcgctacttagcatccagcgggcgacccccatttgctgtaaacgtaccagcgtttcgcaggtggaattagtgtgtagggtagacaacaccaggtgaccagtttgcgccgctttaatagcgatctctgctgtttcgccatcgcggatctctccgatcatgatgacgtcaggatcctggcgcaataacgcacgcaaaacgccctgaaaggtgagtccggcacgcggatggatttgcgtctggtttagtccggctatggggatctcaactggatcttcgacgctacaaatattaatgtcagcggtattcagcttttgcagggcactataaagcgtgaccgttttgccgctgccggtagggccagttaccagcaccagtccctgtggttgttgcaaggcatgagcaaagtccgccagttgtaacggctgcattccaagcgtgttgacatccagtgcctgacccacctgctgtaacaaccttaataccaccttttcaccaccccgacatggtaaggtcgcaatacgaaaactgacggcgtttcctgccagttcgacagtgaattgcccgtcctgcggcaggcgatgttccgcaatatccaggtttcccagcacttttaatctggcggttaatgcgactccggcatccggactaacatccggtaaaggatgcaatacgccgtcgatacgcaagcggatgcggtaggcattgtccgctggttcgatatgaatatcagacgcgcgttgttccagcgcagattgtaacgttcgagttagcaactctgctttgggctgatgcttctcctgaacagctacgggcagtgtctgttgtgtgcgactggcgtgaccttccatttgttggcgcgtccagcaggtgatctcaatacgtttggtggtagcgaaatgcaatgcgtccagtagctcatggctaggtgcatcgactaccgcaacatgaaccacctcttcgctggcatccagcaagactccatgataacgcagacacagggcagtgagctgtggaatattcattgccgctccttagttggcgtcatcaaagcggaagacatcttcgcaggcttgctgcaatgcgctgtcactttgaatattgcagttgcgcgtccagccggtgacgccgtttgcgttatcccaacccggtgtcatgacgacgcttagcccattgagactttcttgcccggtcaggctcaccacgccctttgccacactcatggcactaacatagcgggtggtggtagggctgggaatgccattgctgccaccgtcgcaggtatctaatccaccatgttccagcgcgcacaactctacggcggtacggtaaggcacaaaggtttgtagcatgtcggtgagtgcggctttgcgcaggtagttttgataagcgggaataccaatggcgcttaaaatggcaatgatgccaataaccaccatcagttcgataagtgtaaaaccgcgttgcttgtccatctgtttcgctccttgatttggttggcgctactttggcaaacgccatcagcacaggcgaggggcaaaaaacgaaacgggaaagcagattccgaggttttttatttcgttgcagcgaaagacaagaaatttgcgaggcgttacgaagaaagttggggaaggggagattatccgcccgcgatggagcggataaatctgtcaactattagcgaaaacgcatactaaggtcgagtgcttgtacgtgtttagttagcgcaccgacggagataaagtccacgcccgtttcggcaaattcacgcagtgttttgtcagtgacgttgccagacacttccagtagcgccttgccgttggtgcgtttgacggcttcgcgcatctgttctgtttcgaagttatccagcatgatgatatcggctcctgctttcagggcttcatcaagttcttccagattctctacttcgacttctactggcgcatccgggtgcagccaggacgctttttcgaccgcctggcgcacactgccggaggcaataatatggttttctttgatcaggaaggcatcagaaagccccagacggtgattcgctccgccgccgcaaagtaccgcgtatttcagagcactacgcaggccgggtaaggttttgcgcgtatccaacaactgcgtgttggtgccttccagcaattcgacatagtggcgtaccttactggcaactccactaagggtttgcacaaaattaagcgcagtgcgttcgcccgttaacagcacgcgggatgggccttcaagttcgaacaaggattgattggcattgatgacatcgccgtcatccacatgccagattatggtgacatcgtcgcctgccagttgaataaacacctcttcaacccagcgtttgccgcaaaagacgccattctcgcgggtgatcaccgtggcatgagagcgagaattttccggtaaaagttttgccgtaatatcattgttggcatcgactgttccgcctaaatcttcccgcagcgcctgggccaccgcgccggggatatcgagattaatgcgttccagcagctcgtcacgtcgggtgtcagggttatagcggcgaggcggcatgttaaaactccagatagctaacgaatcataaggtagaaacatgctactctgaaccgggtattagcaccacatataaggagatcctgcatgttgttagaacaggggtggctggttggcgcgcgccgcgttcccagtccacattacgattgccgcccggatgacgaaacacccaccctgctggtggtgcacaatattagcctgccgccaggcgagtttggcggtccgtggatcgacgcattattcactggaactattgatccgcaggcacatcctttctttgctgagatcgcccatttgcgcgtctccgctcactgtttgattcgccgtgatggtgaaatagtccagtatgttcctttcgataaacgtgcatggcatgcgggagcctctcagtatcaggggcgcgaacgctgcaatgatttttctattgggattgagcttgaaggcaccgatacgctggcgtataccgatgcgcagtatcaacagcttgcggcggttacgcgggcactgattgattgctatccggatatcgctaaaaacatgacgggccattgtgatattgcgccggatcggaaaaccgatcccggtcctgcatttgattgggcacggtttcgtgtgctggtcagcaaggagacaacatgacgctatttacaaccttactggtgttaattttcgagcgcctgtttaagttgggcgagcactggcagcttgatcatcgtcttgaagcgttctttcggcgggtgaaacatttttctctcgggcgcacgttaggcatgaccattattgcgatgggcgtgacttttttactgttacgcgcattgcagggagtattgttcaacgttcccacgctactggtgtggctgctgattggtttgctgtgtattggcgcaggtaaagttcgtcttcattatcatgcttatctgacagctgctagtcgtaatgatagccatgcccgtgccacgatggctggcgaactcaccatgattcacggcgtcccggcaggctgcgacgaacgtgagtatttgcgtgagctgcaaaatgcattgctgtggattaactttcgtttttatcttgcaccgctgttctggctgattgtggggggaacctggggacccgttacgctgatggggtatgcgtttttgcgtgcatggcaatactggctggcgcgatatcagacgccgcatcatcgtttacagtccggcattgatgccgtgcttcatgtactggattgggtgccggttcgtcttgcgggtgtggtatatgccttgatcggtcatggtgagaaagcgttaccggcctggtttgctagcctgggtgatttccatactagccagtatcaggtgttaacgcgtctggcgcagttctctctggcgcgtgaaccgcatgtcgataaggtggagacgccgaaggcagcggttagtatggcgaagaaaaccagcttcgtggtcgtggtggtgattgcactactgacgatttacggggcgttggtgtaaagattattgccctcaccctgtacgggtgagggcgtagagagattaatgcgcttttacggctttggcggttttctctttaaacagatagccgatacctaacacgatcagccataccgggatcaggtatacgctaatcgccattcctggggtcatcagcataatcaccagtaccgccgccataaacagcaggcagatccagttacccagcggataaagcagagcagggaagcgagttaccacgccttgttcctgcttggcgcgacggaatttcatatgcgccaggctaatcatcgcccagttgattaccagtgcagataccaccagcgccattaacagtccgaaagcggactctggggcaaggtagttaatcagtacgcacaacgccgttaccagtgcagacaccagaatggtatttactggtacaccacgtttatcgacagacgccagcgcttttggcgcattaccctgttgtgccagaccaaacagcatacggctgttgcaatatacgcagctgttgtacacggagagcgccgcagtcagtaccacgatgttcagcgcattcgccacaaaggtatcgcctaactcgtggaagatcagcacaaacggactggtatcggcggtaacgcgggtccacggcatcagactgagcagaacggctaagctaccaatatagaaaatcaggatgcggtagataacctggttagttgctttcggtatactttgctccgggttatcagcttctgctgcggtgatccccaccagttccagaccaccgaagctgaacatgataatcgccatcatcatcaccagcccggtgaagccgtgcggcaggaaaccaccctgatcccacaggttgctaacggtcgcctgcgggccgccgttgccactgaatagcagccagccgccgaagatgatcatcgctaccaccgcgataactttgataatggcaaaccagaactccatctcgccaaacactttaacgttggtcaggttgatggcgttaatcaccacaaagaatacggcggcagaaacccaggtggggatttccggataccagaactgaatgtatttacccacggcagtcagctcagccatggcaactaaaacgtacagtacccagtagttccagccagaggcgaaaccggcaaaactgccccagtatttataagcaaagtggctaaaggagcctgcgacaggttcttcgaccaccatttcacccagctgacgcatgatcagaaaggcgataaaaccagcaatggcgtaacccaggataatccctggccctgcggactgtattacggaggcgctacccaggaataacccggtccctatcgcgccacccagcgcgataagctgaatatggcggtttttaaggccgcgctttagctgctcgccgtgctgttgaccttccatcatgaaacctcgtgcggtggttgtttttttgatctacgcagtgatgcgtgtgtaagtttgcaattccgtttgttgtattaatttgtttacatcaaagaagtttgaattgttacaaaaagacttccgtcagatcaagaataatggtatgcggcagcgaatgcacccgctttatgcatggttgaagatgagttgcttaaaaagaaaccgtttgtaaagctcagcctcaacccctctcaatatgtagaatgaatttaaattcgttttaattgaattaaaaatcacaaaattggtaagtgaatcggttcaattcggatttttatagtttaataatcgttaaaaaactcctttcctacgtaaagtctacatttgtgcatagttacaactttgaaacgttatatatgtcaagttgttaaaatgtgcacagtttcatgatttcaatcaaaacctgtatggacataaggtgaatactttgttactttagcgtcacagacatgaaattggtaagaccaattgacttcggcaagtggcttaagacaggaactcatggcctacagcaaaatccgccaaccaaaactctccgatgtgattgagcagcaactggagtttttgatcctcgaaggcactctccgcccgggcgaaaaactcccaccggaacgcgaactggcaaaacagtttgacgtctcccgtccctccttgcgtgaggcgattcaacgtctcgaagcgaagggcttgttgcttcgtcgccagggtggcggcacttttgtccagagcagcctatggcaaagcttcagcgatccgctggtggagctgctctccgaccatcctgagagtcagtatgacttgctcgaaacacgacacgccctggaaggtatcgccgcttattacgccgcgctgcgtagtaccgatgaagacaaggaacgcatccgtgaactccaccacgccatagagctggcgcagcagtctggcgatctggacgcggaaagtaacgccgtactccagtatcagattgccgtcaccgaagcggcccacaatgtggttctgcttcatctgctaaggtgtatggagccgatgttggcccagaatgtccgccagaacttcgaattgctctatagccgtcgcgagatgctgccgctggtgagtagtcaccgcacccgcatatttgaagcgattatggccggtaagccggaagaagcgcgcgaagcaagccatcgccatctggcctttatcgaagaaattttgctcgacagaagtcgtgaagagagccgccgtgagcgttctctgcgtcgtctggagcaacgaaagaattaatgatttttctggtaaaaattatccagaagatgttgtaaatcaagcgcatataaaagcgcggcaactaaacgtagaacctgtcttattgagctttccggcgagagttcaatgggacaggttccagaaaactcaacgttattagatagataaggaataacccatgagtgaacgtttcccaaatgacgtggatccgatcgaaactcgcgactggctccaggcgatcgaaagcgtcatccgtgaagaaggtgttgagcgtgctcagtatctgatcgaccaactgcttgctgaagcccgcaaaggcggtgtaaacgtagccgcaggcacaggtatcagcaactacatcaacaccatccccgttgaagaacaaccggagtatccgggtaatctggaactggaacgccgtattcgtagtgctatccgctggaacgccatcatgacggtgctgcgtgcgagcaaaaaagacctcgaactgggcggccatatggcgtccttccagtcttccgcaaccatttatgatgtgtgctttaaccacttcttccgtgcacgcaacgagcaggatggcggcgacctggtttacttccagggccacatctccccgggcgtgtacgctcgtgctttcctggaaggtcgtctgactcaggagcagctggataacttccgtcaggaagttcacggcaatggcctctcttcctatccgcacccgaaactgatgccggaattctggcagttcccgaccgtatctatgggtctgggtccgattggtgctatttaccaggctaaattcctgaaatatctggaacaccgtggcctgaaagatacctctaaacaaaccgtttacgcgttcctcggtgacggtgaaatggacgaaccggaatccaaaggtgcgatcaccatcgctacccgtgaaaaactggataacctggtcttcgttatcaactgtaacctgcagcgtcttgacggcccggtcaccggtaacggcaagatcatcaacgaactggaaggcatcttcgaaggtgctggctggaacgtgatcaaagtgatgtggggtagccgttgggatgaactgctgcgtaaggataccagcggtaaactgatccagctgatgaacgaaaccgttgacggcgactaccagaccttcaaaagcaaagatggtgcgtacgttcgtgaacacttcttcggtaaatatcctgaaaccgcagcactggttgcagactggactgacgagcagatctgggcactgaaccgtggtggtcacgatccgaagaaaatctacgctgcattcaagaaagcgcaggaaaccaaaggcaaagcgacagtaatccttgctcataccattaaaggttacggcatgggcgacgcggctgaaggtaaaaacatcgcgcaccaggttaagaaaatgaacatggacggtgtgcgtcatatccgcgaccgtttcaatgtgccggtgtctgatgcagatatcgaaaaactgccgtacatcaccttcccggaaggttctgaagagcatacctatctgcacgctcagcgtcagaaactgcacggttatctgccaagccgtcagccgaacttcaccgagaagcttgagctgccgagcctgcaagacttcggcgcgctgttggaagagcagagcaaagagatctctaccactatcgctttcgttcgtgctctgaacgtgatgctgaagaacaagagcatcaaagatcgtctggtaccgatcatcgccgacgaagcgcgtactttcggtatggaaggtctgttccgtcagattggtatttacagcccgaacggtcagcagtacaccccgcaggaccgcgagcaggttgcttactataaagaagacgagaaaggtcagattctgcaggaagggatcaacgagctgggcgcaggttgttcctggctggcagcggcgacctcttacagcaccaacaatctgccgatgatcccgttctacatctattacagcatgttcggcttccagcgtattggcgatctgtgctgggcggctggcgaccagcaagcgcgtggcttcctgatcggcggtacttccggtcgtaccaccctgaacggcgaaggtctgcagcacgaagatggtcacagccacattcagagcctgactatcccgaactgtatctcttacgacccggcttacgcttacgaagttgctgtcatcatgcatgacggtctggagcgtatgtacggtgaaaaacaagagaacgtttactactacatcactacgctgaacgaaaactaccacatgccggcaatgccggaaggtgctgaggaaggtatccgtaaaggtatctacaaactcgaaactattgaaggtagcaaaggtaaagttcagctgctcggctccggttctatcctgcgtcacgtccgtgaagcagctgagatcctggcgaaagattacggcgtaggttctgacgtttatagcgtgacctccttcaccgagctggcgcgtgatggtcaggattgtgaacgctggaacatgctgcacccgctggaaactccgcgcgttccgtatatcgctcaggtgatgaacgacgctccggcagtggcatctaccgactatatgaaactgttcgctgagcaggtccgtacttacgtaccggctgacgactaccgcgtactgggtactgatggcttcggtcgttccgacagccgtgagaacctgcgtcaccacttcgaagttgatgcttcttatgtcgtggttgcggcgctgggcgaactggctaaacgtggcgaaatcgataagaaagtggttgctgacgcaatcgccaaattcaacatcgatgcagataaagttaacccgcgtctggcgtaagaggtaaaagaataatggctatcgaaatcaaagtaccggacatcggggctgatgaagttgaaatcaccgagatcctggtcaaagtgggcgacaaagttgaagccgaacagagcctgatcaccgtagaaggcgacaaagcctctatggaagttccgtctccgcaggcgggtatcgttaaagagatcaaagtctctgttggcgataaaacccagaccggcgcactgattatgattttcgattccgccgacggtgcagcagacgctgcacctgctcaggcagaagagaagaaagaagcagctccggcagcagcaccagcggctgcggcggcaaaagacgttaacgttccggatatcggcagcgacgaagttgaagtgaccgaaatcctggtgaaagttggcgataaagttgaagctgaacagagcctgatcaccgtagaaggcgacaaggcttctatggaagttccggctccgtttgctggcaccgtgaaagagatcaaagtgaacgtgggtgacaaagtgtctaccggcagcctgattatggtcttcgaagtcgcgggtgaagcaggcgcggcagctccggccgctaaacaggaagcagctccggcagcggcccctgcaccagcggctggcgtgaaagaagttaacgttccggatatcggcggtgacgaagttgaagtgactgaagtgatggtgaaagtgggcgacaaagttgccgctgaacagagtctgatcaccgtagaaggcgacaaagcttctatggaagttccggcgccgtttgcaggcgtcgtgaaggaactgaaagtcaacgttggcgataaagtgaaaactggcagcctgattatgatcttcgaagttgaaggcgcagcgcctgcggcagctcctgcgaaacaggaagcggcagcgccggcaccggcagcaaaagctgaagccccggcagcagcaccagctgcgaaagcggaaggcaaatctgaatttgctgaaaacgacgcttatgttcacgcgactccgctgatccgccgtctggcacgcgagtttggtgttaaccttgcgaaagtgaagggcactggccgtaaaggtcgtatcctgcgcgaagacgttcaggcttacgtgaaagaagctatcaaacgtgcagaagcagctccggcagcgactggcggtggtatccctggcatgctgccgtggccgaaggtggacttcagcaagtttggtgaaatcgaagaagtggaactgggccgcatccagaaaatctctggtgcgaacctgagccgtaactgggtaatgatcccgcatgttactcacttcgacaaaaccgatatcaccgagttggaagcgttccgtaaacagcagaacgaagaagcggcgaaacgtaagctggatgtgaagatcaccccggttgtcttcatcatgaaagccgttgctgcagctcttgagcagatgcctcgcttcaatagtagcctgagcgaagacggtcagcgtctgaccctgaagaaatacatcaacatcggtgtggcggtggataccccgaacggtctggttgttccggtattcaaagacgtcaacaagaaaggcatcatcgagctgtctcgcgagctgatgactatttctaagaaagcgcgtgacggtaagctgactgcgggcgaaatgcagggcggttgcttcaccatctccagcatcggcggcctgggtactacccacttcgcgccgattgtgaacgcgccggaagtggctatcctcggcgtttccaagtccgcgatggagccggtgtggaatggtaaagagttcgtgccgcgtctgatgctgccgatttctctctccttcgaccaccgcgtgatcgacggtgctgatggtgcccgtttcattaccatcattaacaacacgctgtctgacattcgccgtctggtgatgtaagtaaaagagccggcccaacggccggcttttttctggtaatctcatgaatgtattgaggttattagcgaatagacaaatcggttgccgtttgttgtttaaaaattgttaacaattttgtaaaataccgacggatagaacgacccggtggtggttagggtattacttcacataccctatggatttctgggtgcagcaaggtagcaagcgccagaatccccaggagcttacataagtaagtgactggggtgagggcgtgaagctaacgccgctgcggcctgaaagacgacgggtatgaccgccggagataaatatatagaggtcatgatgagtactgaaatcaaaactcaggtcgtggtacttggggcaggccccgcaggttactccgctgccttccgttgcgctgatttaggtctggaaaccgtaatcgtagaacgttacaacacccttggcggtgtttgcctgaacgtcggctgtatcccttctaaagcactgctgcacgtagcaaaagttatcgaagaagccaaagcgctggctgaacacggtatcgtcttcggcgaaccgaaaaccgatatcgacaagattcgtacctggaaagagaaagtgatcaatcagctgaccggtggtctggctggtatggcgaaaggccgcaaagtcaaagtggtcaacggtctgggtaaattcaccggggctaacaccctggaagttgaaggtgagaacggcaaaaccgtgatcaacttcgacaacgcgatcattgcagcgggttctcgcccgatccaactgccgtttattccgcatgaagatccgcgtatctgggactccactgacgcgctggaactgaaagaagtaccagaacgcctgctggtaatgggtggcggtatcatcggtctggaaatgggcaccgtttaccacgcgctgggtagtcagattgacgtggttgaaatgttcgaccaggttatcccggcagctgacaaagacatcgttaaagtcttcaccaagcgtatcagcaagaaattcaacctgatgctggaaaccaaagttaccgccgttgaagcgaaagaagacggcatttatgtgacgatggaaggcaaaaaagcacccgctgaaccgcagcgttacgacgccgtgctggtagcgattggtcgtgtgccgaacggtaaaaacctcgacgcaggcaaagcaggcgtggaagttgacgaccgtggtttcatccgcgttgacaaacagctgcgtaccaacgtaccgcacatctttgctatcggcgatatcgtcggtcaaccgatgctggcacacaaaggtgttcacgaaggtcacgttgccgctgaagttatcgccggtaagaaacactacttcgatccgaaagttatcccgtccatcgcctataccgaaccagaagttgcatgggtgggtctgactgagaaagaagcgaaagagaaaggcatcagctatgaaaccgccaccttcccgtgggctgcttctggtcgtgctatcgcttccgactgcgcagacggtatgaccaagctgattttcgacaaagaatctcaccgtgtgatcggtggtgcgattgtcggtactaacggcggcgagctgctgggtgaaatcggcctggcaatcgaaatgggttgtgatgctgaagacatcgcactgaccatccacgcgcacccgactctgcacgagtctgtgggcctggcggcagaagtgttcgaaggtagcattaccgacctgccgaacccgaaagcgaagaagaagtaatttttcgtttgccggaacatccggcaattaaaaaagcggctaaccacgccgctttttttacgtctgcaatttacctttccagtcttcttgctccacgttcagagagacgttcgcatactgcactccgttgctcgttattcagcctgacagtatggttactgtcgtttagacgttgtgggcggctctcctgaactttctcccgaaaaacctgacgttgttcaggacttgcgctttgaacacgctggcgggcgttatcacgttgctgttgattcagtgggcgctgctgtactttttccttaaacacctggcgctgctctggacttgcggactgaatacgctcacgcgctgcgtctcttcgctgctggttctgcgggttagtctgcattttctcgcgaaccgcctggcgctgctcagggctggcggactgaatgcgctcacgcgctgcctctcttcgctgctggatcttcgggttagtctgcattctctcgcgaactgcctggcgctgctcagggctggcggactgataacgctgacgagcggcgtccttttgttgctgggtcagtggttggcgacggctgaagtcgtggaagtcgtcatagctcccatagtgttcagcttcattaaaccgctgtgccgctgcctgacgttgggtatctcgtgtaatgactggtgcggcgtgtgttcgttgctgaaactgatttgctgccgcctgacgctggctgtcgcgcgttggggcaggtaattgcgtggcgctcattccgccgttgacatcggtttgatgaaaccgctttgccatatcctgatcatgatagggcacaccattacggtagtttggattgtgccgccatgccatattcttatcagtaagatgctcaccggtgatacggttgaaattgttgacgtcgatattgatgttgtcgccgttgtgttgccagccattaccgtcacgatgaccgccatcgtggtgatgataatcatcattgtcatgatgatgatggtcatgatcgtcgtcgtcccagtcgatgctgctgaatagtgcgtacgtggtagcaacgcccatgctatagccgaatccgcgtacaaagctgtcaacaaacggttctccggctggtggtggcagataaaccggcggatacgcagtattggcccagttcccgtaaaccacggttgggttgtagttgggaatatagaccacatcaggattggcgggctcaatggaaatgacggttgttgccggctctgtaatgacggggttggcagttaaaactgtattggatggtatgacgggtgccgtgactgtctgttttaccggtacagctttcttcgttgtggtaataactttctgttcggtactactcttcaggctgccggtttgttgcgccagttgccgcaatcgctgtacgctgtccatcacgtcctgcggctgggccagaaaagcatcgcccaggttttgcacccattgcgggttttcgcccatcaatgccatcaattgtggaaaggccaccagacttttaacgctggcgtcccacggctggtcagataccgcctgaatagcagcatcgccttgtttaagtggattatcgtggctccattgcactgcttgagcaacgtttgtcggataggtacttgccatcagcacctggctaagtagggcgtcgggatacagcgcgacgggcgcgacccattgatctatttgtgcagtgctgaatgcggatttgacgacggcgggtgttacgggaggtgcggaaaccgttgcaggaaacgtaaccgcggcagcgtcagacacagccagttgtgtgctttgcggttccacaggcgcttccactgtgcggctttttatatatagcccggtagaggcggcacaaagcccggcactgcaaattagcgccagcacatggggtttaaacggcaaagtcattttcataattcggatctcaaggaaatcgcaatggtcggcgaactgccacccgcaggtgctgtgaatccgagtataaagaggcggtagtttaaattttgactaatcttgggattcgttgagaaaggtgattatcaccatgcgaattaacgaagtttttacggagggaaacaatctctagaccatccttaacgattcagccacttttttatgttgcttttttgtaaacagattaacacctcgtcaaaatcctgctattctgcccgttgcggtactgggcatttaccctacaaactgctgtctcacaggagcgtgaagagaatcgcctgccgcactatgacaatgagagcgaggagaaccgtcgtgctagaagaataccgtaagcacgtagctgagcgtgccgctgaggggattgcgcccaaacccctggatgcaaaccaaatggccgcacttgtagagctgctgaaaaacccgcccgcgggcgaagaagaattcctgttagatctgttaaccaaccgtgttcccccaggcgtcgatgaagccgcctatgtcaaagcaggcttcctggctgctatcgcgaaaggcgaagccaaatcccctctgctgactccggaaaaagccatcgaactgctgggcaccatgcagggtggttacaacattcatccgctgatcgacgcgctggatgatgccaaactggcacctattgctgccaaagcactttctcacacgctgctgatgttcgataacttctatgacgtagaagagaaagcgaaagcaggcaacgaatatgcgaagcaggttatgcagtcctgggcggatgccgaatggttcctgaatcgcccggcgctggctgaaaaactgaccgttactgtcttcaaagtcactggcgaaactaacaccgatgacctttctccggcaccggatgcgtggagtcgcccggatatcccactgcacgcgctggcgatgctgaaaaacgcccgtgaaggtattgagccagaccagcctggtgttgttggtccgatcaagcaaatcgaagctctgcaacagaaaggtttcccgctggcgtacgtcggtgacgttgtgggtacgggttctagccgtaaatccgccactaactccgttctgtggtttatgggcgatgatattccacatgtgccgaacaaacgcggcggtggtttgtgcctcggcggtaaaattgcacccatcttctttaacacgatggaagacgcgggtgcactgccaatcgaagtcgacgtctctaacctgaacatgggcgacgtgattgacgtttacccgtacaaaggtgaagtgcgtaaccacgaaaccggcgaactgctggcgaccttcgaactgaaaaccgacgtgctgattgatgaagtgcgtgctggtggccgtattccgctgattatcgggcgtggcctgaccaccaaagcgcgtgaagcacttggtctgccgcacagtgatgtgttccgtcaggcgaaagatgtcgctgagagcgatcgcggcttcagcctggcgcaaaaaatggtaggccgtgcctgtggcgtgaaaggcattcgtccgggcgcgtactgtgaaccgaaaatgacttctgtaggttcccaggacaccaccggcccgatgacccgtgatgaactgaaagacctggcgtgcctgggcttcagcgctgacctggtgatgcagtctttctgccacaccgcggcgtatccgaagccagttgacgtgaacacgcaccacacgctgccggacttcattatgaaccgtggcggtgtgagcctgcgtccgggtgacggcgtcattcactcctggctgaaccgtatgctgctgccggataccgtcggtaccggtggtgactcccatacccgtttcccgatcggtatctctttcccggcgggttctggtctggtggcgtttgctgccgcaactggcgtaatgccgcttgatatgccggaatccgttctggtgcgcttcaaaggcaaaatgcagccgggcatcaccctgcgcgatctggtacacgctattccgctgtatgcgatcaaacaaggtctgctgaccgttgagaagaaaggcaagaaaaacatcttctctggccgcatcctggaaattgaaggtctgccggatctgaaagttgagcaggcctttgagctaaccgatgcgtccgccgagcgttctgccgctggttgtaccatcaagctgaacaaagaaccgatcatcgaatacctgaactctaacatcgtcctgctgaagtggatgatcgcggaaggttacggcgatcgtcgtaccctggaacgtcgtattcagggcatggaaaaatggctggcgaatcctgagctgctggaagccgatgcagatgcggaatacgcggcagtgatcgacatcgatctggcggatattaaagagccaatcctgtgtgctccgaacgacccggatgacgcgcgtccgctgtctgcggtacagggtgagaagatcgacgaagtgtttatcggttcctgcatgaccaacatcggtcacttccgtgctgcgggtaaactgctggatgcgcataaaggtcagttgccgacccgcctgtgggtggcaccgccaacccgtatggacgccgcacagttgaccgaagaaggctactacagcgtcttcggtaagagtggtgcgcgtatcgagatccctggctgttccctgtgtatgggtaaccaggcgcgtgtggcggacggtgcaacggtggtttccacctctacccgtaacttcccgaaccgtctgggtactggcgcgaatgtcttcctggcttctgcggaactggcggctgttgcggcgctgattggcaaactgccgacgccggaagagtaccagacctacgtggcgcaggtagataaaacagccgttgatacttaccgttatctgaacttcaaccagctttctcagtacaccgagaaagccgatggggtgattttccagactgcggtttaaaaagtcagcgcacgcgctgcgcataaacgacacaatgcccggtgaatgagattcccgggcatttttttatttctaaaccatcgccgttccgctgtttttctccggtaaggctgcgataattacatcaatggcgcaatgcgatttcggtgcattgccgggagcagaggaacacactatggattacgaatttctgcgcgatattaccggagtggtaaaggtgcgtatgtccatggggcatgaagtggtcgggcactggtttaatgaagaggtgaaagaaaacctggccttgcttgatgaagtggaacaagcagcgcacgcactgaaaggtagcgaacggtcctggcaacgggcagggcatgaatacaccctgtggatggacggtgaagaggtgatggttcgcgccaatcaactggaattcgctggcgatgaaatggaagaggggatgaactactacgacgaagaaagcctgagcctatgcggcgttgaggattttctgcaggtcgtggcggcttaccgcaatttcgtgcagcagaagtaaataaatctggcggagcctgggagctccgccagagccgttaaacagctggcatattgcgcccgtaataaatctcgcgcatttctttccacagcgcagcggtaatttcctggcgctcgctgtcggttaagtcttccggtttggtgtggaacatgtagtgcttaaggtcgaactctttaagcaacatcttggtatggaagatattttcctgatagacgttcacatccaccatgtcatacagcgccttcatatcgtcagacataaagttctgaatgctattaatctcatggtcgataaagtgcttcataccgttaatgtcgcgggtaaaaccgcgcacgcgataatcaatggttacgatatcggactcaagctggtggatcaggtaattcagcgccttcagcggagaaatcacgccgcaggtagagacttcaatatcggcgcggaaggtacataaaccgccttcaggatgactttccgggtaggtatgtacgcaaatatgacttttatcaagatgggcaacgaccgtttctggcagtgggccggggtgttctgttttgtcgatgagtttcgggtcaaccggttcttcactcaccagaatagtgacgctggcaccctgtggttcgtaatcctggcgggcgatgttaagaatattagccccgataatggaacaggtttcactcaggatttcggtcagacggttggcattatagagttcatcgatataagcaatataaccgtcgcgctcttcggcagttttggcgtagcagatatcgtaaatacaaaaactcagacttttggtcagattattaaagccatgcagtttcagttttttcaatttcttatcttctccttaggacggctgactagccagtgcgtcttgcagatactgaggtaaggcaaaagctgccgtatggattgccggattgtaataacggcatttcaggccagaggcgagaaaacgcgcctgaataatttcggtactgagatggcgtaaggcgtcgttatctgtcgcccatgcaaaagtcatgataccgccgtaataggtcgggatcgccgcctgataaaagccaacgtcgctgaagtaatggctgagtttgcgatggctgtcgatggcttcttcctgctgtaaaaagcagacgccgttttgtgcgacgaagataccgccaggattcaggcaacgtttgcagccttcataaaatgcgctagtgaaaaggctttcgccgggaccgataggatcggtgcagtcggagataatgacatcaaaggtctggctggtttgattaacgaaattgacgccatcgtcgatcaccagcttaaagcgcggatcgtcgtagctaccggcgttatggttgggtagatactgacggcagaagcttacgacacccgcatcgatttccaccatcgtgatactctcaacgtttttatgtcgggttacttcacgcagcatggcaccgtcgccgccgccgataatcagcacatgtttcgcgtgaccatgggccagtagcggaacatgggtcatcatctcatgatagataaactcgtcgcgctcggtggtttgtactacgccatccagcgccattacgcgaccaaatgcagcgttctcaaaaatgatcagatcctggtgatcggtcttttcatgatacagaacgttatctaccgcaaagtactgcccaaactggtcgtgtagcgtttcatgccactgttttttttcggccatgggttgatacctcctttgttaacacccgtaaaaaaagggcgcaacataatagctaacattgaccgcggatgcacggtcaatatttctacaaaaaggtatcagggattatttgacgtaggcaagcaggcttaaggaatcgcgggccagggctttgcattttttagcgacgggaatgccaatgccgctgagatcgcggtagctgtcttcaccgagggctttcatgtcgaaggtgtcgtaattactgaggtcccactggttttgctgagcgaaaaagaccagtgcgcgacgaatttgcccgttaggtaagttctggtaaccacaatcgttcttcagaaagacaaaaactgccgttaaatcggccatatcttcggcttcagactcgctgagcgcgtaactgtttgcgcagacggccatcaggctgccgaataacactgttctgaaaaacgtcttcattgcttctaccaggggcttaaagaagataaacgttagcacactgcgagcgaggcgacgaccattattgtcgattaaattgtgtctgcggcttgaccttcccgtaaggggaaggactatgctcaacgtttgattttgtttcgcctgcttaagaataaggaaataactatgcaacgtcgtgatttcttaaaatattccgtcgcgctgggtgtggctagcgctttgccgctgtggagccgcgcagtatttgcggcagaacgcccaacgttaccgatccctgatttgctcacgaccgatgcccgtaatcgcattcagttaactattggcgcaggccagtccacctttggcgggaaaactgcaactacctggggctataacggcaatctgctggggccggcggtgaaattacagcgcggcaaagcggtaacggttgatatctacaaccaactgacggaagagacaacgttgcactggcacgggctggaagtaccgggtgaagtcgacggcggcccgcagggaattattccgccaggtggcaagcgcagcgtgacgttgaccgttgatcaacctgccgctacctgctggttccatccgcatcagcacggcaaaaccgggcgacaggtggcgatggggctggctgggctggtggtgattgaagatgacgagatcctgaaattaatgctgccaaaacagtggggtatcgatgatgttccggtgatcgttcaggataagaaatttagcgccgacgggcagattgattatcaactggatgtgatgaccgccgccgtgggctggtttggcgatacgttgctgaccaacggtgcaatctacccgcaacacgctgccccgcgtggttggctgcgcctgcgtttgctcaatggctgtaatgcccgtagcctcaatttcgccaccagcgacaatcgcccgctgtatgtgattgccagcgacggtggtctgctacctgaaccagtgaaggtgagcgaactgccggtgctgatgggcgagcgttttgaagtgctggtggaggttaacgataacaaaccctttgacctggtgacgctgccggtcagccagatggggatggcgattgcgccgtttgataagcctcatccggtaatgcggattcagccgattgctattagtgcctccggtgctttgccagacacattaagtagcctgcctgcgttacctagcctggaagggctgacggtacgcaagctgcaactctctatggacccgatgctcgatatgatggggatgcagatgctaatggagaaatatggcgatcaggcgatggccgggatggatcacagccagatgatgggccatatggggcacggcaatatgaatcatatgaaccacggcgggaagttcgatttccaccatgccaacaaaatcaacggtcaggcgtttgatatgaacaagccgatgtttgcggcggcgaaagggcaatacgaacgttgggttatctctggcgtgggcgacatgatgctgcatccgttccatatccacggcacgcagttccgtatcttgagtgaaaatggcaaaccgccagcggctcatcgcgcgggctggaaagataccgttaaggtagaaggtaatgtcagcgaagtgctggtgaagtttaatcacgatgcaccgaaagaacatgcttatatggcgcactgccatctgctggagcatgaagatacggggatgatgttagggtttacggtataaaaagaccgtattcggaaatatgcccggatctctccgggcattaaactgatgacaaacgcaaatctgcctgatgcgctacgcttatcaggcctacgctagctgtgcaatccattgattttgcacaattttgtaggctggataaggcgttcacgccgcatccggcatgaacaacgcgcacgttgtcagcaatctgagcaagtcttacttcacatcatccggcagcgcataagccacaatatagtcgcccatcttcgtaccaaaactaccgtgaccgcctgcggagatcaccacatactgcttaccattcacttcataggtcattggcgtagcctgaccacccgctggtaaacgaccctgccacagtttttcaccgttgctcatgttgtaagcgcgcaggtagttatctgccgtagcggcgataaacagcacgttacccgccgtggagattggcccgcccagcatcggcatacccatattgaacggcaccggaaccggcatcgggaacggcatactgtcctgcggcgtaccaatacgtttcttccacaccacttcattagttttcagatccagcgcgctgatataaccccatgctggctgtttacatggcagaccaaatggactgaggaacgggttgagcgtgacaccatacggtacaccgtactgtggctgaatgccggattccgtacccgtgcctttggcatctttcggctgctccatcgggttgccaggaccacgcgggatcagtttgctaacaaacggcagtgccattgggttggcaatcgccacttcacgatttggatcaacggaaatcccgccccattcgaacatccccaggttacccgggaagaccagcgtaccctgttcagatggcggggtgaaaatgccttcatagcgcatctggtggaacatcacgcggcacaccagttggtcaaacatggtggctccccacatatccgcaccgctcaaatctttcgtcggacggaagctcagttcagaaaacggttgagttggggttacgtaatcgcctttcgctgcaccttggggaaccggtttttccggtgccggaaccaccagttcgccattacgacgatcgagcacaaaaatgttgccggttttcgccggagcgtaaataactggcactttctgaccattaacggtgatgtccgccagcgtcggctgtgccggaagatccatgtcccacaggtcgtggtgaacggtctggtagctccacgccagtttcccggtagtggcattcagcgccagaatgctgctggcataacgttcctgttccggtgtgcggttaccgccccagatatccggcgtggtcacgcccatcggcagatagaccagatccagcttcgcgtcataggccgctggtgcccaggagtttgggctgttaaaggtaaaggtgtgttcgtcagacgggattgcgttcggatctttcgcgccgggatcaaaagcccacagcagctccccggtgttgacatcaaaaccacggatcacgccagacgtttcgcgggtactgaagttatcggtaacactaccggccatcacgatggttttatcggtgataatcggtgggctagtcggttcatacagacccggtttggtgtctggcatattgctttgcagattgagcacgcctttattggcgaaggtttcgcacagtttgccgttttcagcgttaatcgcaatcagtcgaccatcattgaccggaagaatgatacgacgcgggcaatccgccatcacttccgggctagcggtttctgctttggcttcatgataagagacaccacggcaggttacgtgctggaaagactcgttggttttcagctcaggatcgtaatgccatttctctttgccgctggcggcatcaagcgcaaacaggcgctggtgagcggtacacaggtaaagggtgtcgcccactttaatcggcgtcacttcattggtgatttcacccggatcgttcggctgcttcacatcgccagtacggaacacccaggcttctttcagattatggacgttatcggcgttaatttgtttcagcgggctaaagcgttgaccttcctgattacgaccataggcaggccagtcctgatcggctacgggggagatagcttcagcaggtgtggcatcggcgcttaaggtgccgttgatctcctgcggatcgttaaatccggcccaggtcaggataccaccgctaatcagcagtgcgaccaccagtgcggcaactgcgccgctggcaggaatgaccaggcgacgccagacaaacggcaggatcagccagatgccgaagaagaccagaatgtcgctgcgcggagtcagcgcccagaagtcgaaaccaacttcccagacgccccaaatcatggtgccgagcagcagggctgcgtatagccaaagcgcggcgcgtttactgcgccacagcatccaggcgacgccgagcatcacaaggccagcgatagggtagtaccaggagccgccaatcgcgaccagccagcctccgccaatgagtagatacagcccgcaaagcgctgcaaaaagggctgttagcgtgacgagtaatcgtcggctgcctgtattgttaattgccataaagagacaccatttcaattcattaatattttagtagcaattaattataggttttaacatgtgtgatcgtcatcacaattcgagctttattaacagattccgcgaatgaatagttttactggtatactgcgtgtcttgcgctttgttgcggtgccaaaacctgcccgtgcgaagtgatttgtttttaaatcatatggttagagatatgaaacatactgtagaagtaatgatccccgaagcggagattaaagcgcgtatcgccgaactgggtcgtcagattactgagcgttacaaagacagcggcagcgatatggtgctggtgggtctgctgcgtggcagttttatgtttatggcggacctgtgccgtgaagttcaggtatctcatgaagtcgactttatgaccgcctccagctacggtagcggcatgtccaccacccgtgatgtgaaaatcctcaaagatctggatgaagatatccgtggcaaggacgtgctgattgttgaagatatcatcgacagcgggaatacactgagcaaagtgcgtgagatcttaagcctgcgcgaaccgaagagcctggcgatttgtacgctgctggataaaccgtcccgtcgtgaagtgaacgtcccggtagaatttatcggtttcagcatcccggatgagtttgtggtgggttacggcattgattacgcacagcgttaccgtcatctgccgtatatcggcaaagtgattctgctggacgagtaagtgtgaagttgccggatgtgttgcatccggcatggcatttttatttgtggttggcgtgtttcagcttgaggttggaaatcccgtgacggtaacgttgctcaagggtttcgcggttggtggcggtaacatccagatcacgcagcaagccgtcgtgaatgccgtaggcccagccgtgaatggtaactttctgcccgcgtttccacgcactttgcataatggtggagtggcccaggttatacacctgttccatgacgttcagttcacacaaggtatccagacggcgctcttgcggcatttcgccgagcaaactgctatgtttgaaccagatatcgcggatatgcagcagccagttgttgataagccccagttccgggttttcaactgcggcttgtacgccgccgcaaccgtagtggccacagataataatgtgttcaacttcgagtacatccactgcatactgaaccacggaaaggcagttcaggtcagtgtgaatgaccaggttagcaacattacggtgaacaaagagttcgcccggttcaagaccggttaaacgttctgcaggaacgcgactgtcggaacatccaatccatagaaagcgcggtttttgcgcttgtgccagtttctcaaaaaacccgggatcctcttccaccagcattttactccatagtgcattgttgctgatgagtgtatctatgtctttcatggaggttaacgacctgtaaccaaataattacgtttggctaatatagggcaactccgggacgatttaaaccacagataaagtgtaagaacgtaaggtaagtaaaaatttatgaccattgcactggaacttcaacagcttaaaaaaacctatccaggcggcgttcaggcgcttcgtgggatagatttgcaggtcgaagcgggtgatttttatgcgcttctcgggccgaacggggccgggaaaagcaccactatcggtattatcagctctctggtaaataaaacctccgggcgggtcagcgtatttggttacgatctcgagaaggatgtcgtgaacgctaaacgtcagttgggactggtgccgcaggaatttaacttcaacccgtttgaaaccgtgcagcaaattgtggtgaatcaggcagggtactacggcgtggagcgcaaagaagcgtacatccgcagcgaaaagtatcttaaacaactcgatctatggggaaaacgcaacgaacgtgcgcgtatgttatctggcgggatgaagcgccgtttaatgattgcccgtgcgttaatgcatgaacctaaactactgattctcgacgaaccgaccgcaggcgtggatattgaacttcgccgcagtatgtggggctttttgaaggatttaaacgacaaaggcaccaccatcattctcaccacacactacctggaagaagcagaaatgctgtgccgcaatatcggcattattcaacacggtgagctggtggaaaataccagcatgaaggcgctgctggcgaagctgaaaagcgaaacctttattctcgatctcgcaccgaaaagcccgttaccgaagctcgatggctatcagtatcgactggtcgataccgcgacgctggaagttgaagtgctgcgtgagcaggggatcaacagcgtatttacgcagttaagtgagcagggcattcaggtattaagtatgcgtaacaaagctaaccgtctggaagagctgtttgttagtctggttaatgaaaaacaaggagatcgcgcatgatgcatctttactgggtggcgctaaaaagcatctgggcgaaagagatccatcgctttatgcgtatctgggtgcagacgctggtgccgccagtcatcaccatgaccctttactttattatcttcggtaacctgattggtagccgtattggcgatatgcatggcttcagctatatgcagttcatcgtaccggggctgatcatgatgagcgtgatcaccaatgcctacgccaacgttgcgagtagtttttttggtgccaagttccagcgtaatattgaagagctgctggtagcgccggttccgactcacgtcattattgccggatatgtcggcggtggcgtggcgcgtggtctgtttgttggcattctggtgacggcaattagtctgttttttgtgccatttcaggtgcatagctgggtattcgttgccttaacgctggtgctcacggcggtgttgttctcccttgcgggtttgctgaacggtgtgtttgccaaaacgttcgatgacatcagcctggtgccaacctttgtgttaacgccactcacgtatttgggcggggtcttttacagtctgactttgttgccgccgttctggcaagggctgagccacctgaacccaatcgtttatatgatcagtggtttccgctacggcttcctcggtatcaatgatgttccgctggtcactacctttggcgtactggtggtctttattgtggcgttttatttgatctgttggagcctgatccaacgtggacgtggtttgcgtagctaaggctatttcctctcctctggatttgggggagaggagttttgacggctatcaccctttatcaacaatggtcagggtagactgattttcggctaaggaggaaggcgatgttaggttgggtaattacctgtcacgatgaccgggcgcaagagatactggatgcgctggagaaaaaacatggggcacttcttcagtgccgggccgtgaatttctggcgcggattaagctctaatatgctcagccgcatgatgtgcgatgctctgcatgaagcggactctggtgagggtgtcatcttcttaaccgatatagccggagcgccaccgtatcgcgtggctagtttattaagccacaaacactcccgttgcgaagtgatttctggtgtcacgttaccgttaattgaacagatgatggcttgccgtgaaaccatgaccagtagtgagtttcgcgagcgtattgtcgaactgggtgcgccggaggtgagtagtctttggcaccaacaacaaaaaaatccgcctttcgtcctcaaacataatttgtatgagtattaacccgcgattctgatggcgcttttgctacaataaaagcgttgtttcaccctcggttattttttcatgtacaaacaagctgttattctcctgctgatgctgtttaccgcaagtgtcagtgccgcgttacctgcccgttatatgcaaaccatcgaaaatgctgcggtctgggcgcaaattggtgacaagatggtgaccgtggggaatattcgggccggacaaatcattgccgtggagcccactgccgcaagttattacgcatttaattttggctttggcaaaggttttatcgataaaggtcatctcgagccggttcaggggcgacaaaaagttgaagacggtttgggcgacctcaacaagccgctgagtaatcagaacttagttacctggaaagatacgccggtctataacgcgccgagtgcgggaagtgcgccatttggggtactggcggacaatttgcgctacccgattttgcataaactgaaagacaggttaaatcaaacctggtatcagatccgtattggcgatcgactggcctatatcagcgcactggatgcccaacccgataatggcctgagcgtgctaacctatcaccatattctgcgcgacgaagaaaacacccgttttcgccatactagcacgaccacaagcgtacgcgctttcaataaccagatggcctggctgcgtgacaggggatacgcgacactgagcatggtgcagctggaaggctacgtgaagaataagatcaatctccctgcgcgagcggtggtgattacctttgatgatggcctcaagagcgtgagccgctatgcgtatcctgtgttgaaacaatatggcatgaaggcgacggcgtttattgttaccagtcgcatcaaacgtcacccgcagaagtggaacccaaaaagcctgcaatttatgagcgtttctgagcttaacgaaattcgcgatgtatttgatttccagagtcatacccattttttgcatcgggtagatggttatcgccgacccatattactgagccgtagtgagcacaatattctgtttgattttgcacgtagtcgccgcgctctggcgcaatttaatccgcatgtctggtatcttagctatccgtttggcggatttaatgacaacgccgtgaaggcagcaaacgatgccggatttcacctggcggtgacaaccatgaaaggcaaagtaaaaccgggggataatccgttgttactaaaacgactttatatcttaagaacggatagcctggagacgatgagccggctggtgagtaaccagccgcagggataacaatcaagcaacctgtaccggaatcgctttcgcggtacgtttcatttcattgtcgccttcaaaataggcgacgttgggtcgccaggtgcgagcttcttcatctggcatggtaacgaagctggcgatgatgacaatatcgccgacactggcgcagtgggccgccgcaccgttaacagaaataattctgctaccgcgttctgccgcgatggcataagtggagaaacgcttgccgttggtgacattccagatatcaatggcttcgttttcgagaataccggctgcgtcaagaaaatcctggtcaatggcgcaagaaccttcatagtgcaggtccgcatgagtcactttcacgcggtggagtttgccctgcagcatcgtgcgaatcataacttctacctttctaccctgtcgttaacgaagcaggcgatgcctgctttgaggaaattctcacgcagtattgcccgatttttgtttagtgtctactcatctgacggcatttgcgtcagcagtttgcgtaccgcgccgaagcgtgccatgtatcgcctgtaacgaattgatatttctctgaacgctgctcggtaaacaataaagaggtggctgacgatagcgcgccttgactggatactgccttcacgcaaagccacacggaagacagggaagatggatgcaccgagtaccacaccgcatgacgcggtatttaaacaatttttaatgcatgcggagacggctcgcgactttctggagatacatttgccagtggaattacgcgaactttgtgacctcaacacgcttcatttagagagcgggagtttcattgaagagagcctgaaaggacacagcacggacgtgctctattccgtgcaaatgcagggcaatcccggttatctgcatgttgtgattgaacaccaaagcaagccggataagaaaatggcctttcgcatgatgcgttattctatagccgccatgcaccggcatctggaggctgaccacgataagctgccgctggtggtgccgatactgttttatcagggcgaggccacaccttatccgctaagtatgtgctggtttgatatgttttacagcccggagctggcgcgacgcgtctataacagtcctttcccgctggtggatatcaccatcacaccggatgacgaaatcatgcaacatcggcggattgcgattctcgaactactgcaaaaacatattcgccagcgcgacttaatgttattgcttgagcaactggtcacgctgatcgacgaagggtacactagcggaagtcagttagttgccatgcaaaactatatgctgcaacgcggtcatactgaacaagcggatttgttttacggtgtgttgagagacagggaaacgggaggggagtctatgatgacgctggcgcagtggtttgaagagaaagggattgagaaggggattcagcagggaagacaggaagtaagtcaggaattcgcccagcgtcttctgagtaaaggaatgtctcgggaagacgttgcagagatggcaaatttacctcttgctgagattgataaggtaattaaccttatttaagttacctgtgttatgacagatgacgtggggtaaattaataactggcgccatcagccgtagcgccagttaagtattacgccagctcgaccattttgttgtcgatcaggcgagcatcgccaagccaggcggctaccagaattactgcccgtttgctggtttcagaaacttccagcaatgtgtcggcatcgcgaatctgaatatcatcggcgcggaagcctttttcattcagttcttgccccgcaatggtaataatttcatcgagatcccgttccccagcctgcaatttgtcagcaatgctacttaaaactttgtacagaccaggcgcaattttgcgttgttccgccgtcagataaccgttacgggaacttagcgccagaccgtctttggcgcgcataattggcacaccgacaatctcaatatcgaagcccatatcggcaaccattttgcggatcagcgccagttgctgaaaatctttttcaccgaagcaggcgatgtccggctggaccaggttgaacagcttgctgacaatagtgctaacgccgcgaaaatgtcccggacggctggcaccttccagcatggtgctaaggccaggaacgtcaacgtaagtgtgggtttcagtaccgttcgggtagatctcttttacgctaggggcgaaaactaaatccactttacgtttgtttagcttctcgcagtcctcctgcaaggtccgtggataacgagccagatcttccgggcggtcgaactgcatcgggttaacgaaaatactgacgacgaccacatcggcgcgggctttggcttcgtcgaccagcttcatatggccatcgtgcaggttacccatggtaggcaccagcgccacgcgcttgccttccatacgcaggcggcgaatttgctgacgcagcagcggcagggtttcgataattaacacaacgtgactccttaatggaaactgtgttcttcgcccggataaacgccggactccacttcagccatatactgccgcacagccgcgcggatgtcgcccgtttcggcgaggaaatttttagcgaatttaggaatgtgaccgccggtaataccaaaggcgtcgtgcatcacgaggatctgcccgtcagtgacgttgcctgcgccaatgccaataaccgggatcgccagtgcttcggtaatacgttttgccagttcaaccggcacgcattccagcaccagcagctgtgccccagcagcttctaaggctaatgcatcgctgagcagttgatcgcccgcttcatcgccgcgcccctgaactttgtagccaccgaaaatattcacactctgtggtgttaaacctaagtgaccacatacaggaacggcacgttcggtcagcatttgtacggtttctaccagccactcaccgccttcaattttgaccatgttagcaccggcacgcataaccgttgcggcgttttcgaaggcttgttccggcgtggcatacgccataaacggcaggtcagccagcagcaggcagtttggtgcgccgcgacgtacggcggcagtgtggtaggcgatatcggcaacggtaactggcagggtggagtcgtgcccctgaaccgtcatgcccaggctatcgcccaccagcatgacgttaagcccttcatcagcaaagagtttggcgaagctatagtcataagcggtgatggtcgcgaaacgttttttttcctgtttgtacttctgcagtaaggagatggtggtcggtttcataacgtatcctgataaattgatgttgtgctgtctggcattttatcagtcacattggtgggggcaatgatttatccgtagcagcactgccagaaggtgacagtgctgctacgttatcagggataggttacctggaaagtactggtggctttaaattcgccgggttcgatagcaatattcccgtcttgctttaatgttgcctggaaatgaagaggctgacttgtgccgttaccttgattagggtaaaccccatcggaggtgtcatcttcggtttcataatctatataaacagaattcgtatcattaggttttaatgtcattagcggatttttactggttgctaaaccttcaatgagtacgccaacgcctttggcggcagtgcttccagtaagcgtattaccaagcagttgtgtgttttgagtacctacttttccagtgacgagttttgtttcaatattacgcacacgaatacaattctgaaggctgatatcaaagggaacaggactagcgccatttttaattgtcccagagctatattctcccattctaaccgtactaccattgacacttggcccggtaagtatggaggtaaaacatgttggtaaggttaatttgacattattcagtgtgaaattgacataaatgtggttgctgtgatctacaacttttgtaccaggactgtaggccttaaagctataaaggtaattactactactggataactggacttgctgattaagtgtaggatcgaaattagtatctgtataaaattcaacagttatgttgtgtactataccaccaatagcccaaaacttatcgtagtcgtctgctttgttgcaacccttagtttgtagatcgctgtctgtgacggaaaagaaaaattcttggttggaaggatctccgatatagattcctgggctttgaatgtcagttattgtatcgtatgcagaccagaccctacttattaacatggtgtaatacagaccaggaacagatgtattaaatagtttatgtccgccataatctttaccactatagaccatggcattttcaatagttattggaccaggattcgctctgccagatgtattgcagtaaagaataccaccaccggtacctgtatccaggtaactccagtacatttttaccccagtcgggccgagctgcgtgggtttataaaaaaccaagttgcttgctgtacttgtgtaattaaaggtcatctgtgcggcagtggaggggcctcgatagttatcaactcctgcattatttcccacaataaaacttgtatatgcactgactgtattacaacaagaatacagtgctaaaaaaagaatgtacctgaagatagtcttcatttttactccaatgtttctttattgttatggtttgcgctgtttttgtttgttattcgtagtaaatatccactaacacatggctcataagttgaccagatgtaacactcaatgcaggatcgattttttgcattcgggtgctaaatttccaggaactaccattcatgtcatcgctcattactggataaacggaacgagatccgccactagcattaagaacattgaatgtattcgcgctatcctgagtagaaaatataactactcctacattacttgctccactgctaatttcattagcaaatatttgcctagagccagcagccatgacaccgctaagggctctaaaatcaatatgtaactgatttagcacatcgccagttccctgtaatgcacagtcggatacagtgatagtgaactcttttccacctggttgataactttcaggagtaacattaccactaaaatatcccaccccaacgacgccaagatcaatattaccctggttactgattccgcttttgcaggtgctgttttttacattggcaacaaggtcaatatcctgtccagcaatggctggacaggcgatgcaaaacagtaaactcagaaacagaattattctcttcatcagcttacgttgagtgggatgcatatatagttcctgaatctgtaagtctgttagttataggttactgtaaatgtggctggtgcagaaaacttacccgcagtgacattgtttacggttttatttttttccacgaccaggcgtgcactcatcggataataaacgaccgcattggctgcagtggagattgttacctcttgacttgctggtgttacacagctaaattgtgttgcactccctgttgccggagttacagtgctccagacttcaacggcgacagcacttgctttatctgcggctgtggaaccatttgcaaaccccgcaccgtcattagcagttccctcgcatgtggctcgcttggttaattttatttgcgcttttttattggggatacccgcacagtctttgaatttgagtttgaatgtttttactttggtcttggcattgatttcagaaatatatacatcaccaaaatcaacaacagaaatgtcctgatcagagtcatttactaatgtagcggtacaagtacccatttctacagtagtaataacggtcagtccaatactgtctgttgccgcataagagagtacgctgaacaaactggcagccaaaacgacactgctggataatccataacgtaaatttttaaatgtcatcataattatccttcttattgatagatgaaattaaacgtcgccagtgcacgaaaattccccggtacgccttgccctgcatctgtttcacgtagcgcaacggtcatttcaagacccttatcgggctgcatctcgtctgtgctccagcgtatcttttccgcactgttaggtttaaggaaagtggcatcatcagtagtccgttttttgaaacccataccgatattacttgtcgtgctagaactatcaccagactgcggtataataagcttaggactgctactacttgcatttccggtcagagtggtatcaatccaactgatgccactgctgcacccactggcaaccagtttaaaatcagcctgagattctgtcgttttattcgcgatcttatccagacccatcttagggattctcaatgtgtagttattattgccatcattcgtgacgttattaccagtaagtgtgatgttacaggttgtcgctttgacagtggctgtaaactctacattaatatccgttgcaaatacactgggacttaataatattcccatcagtatcactattttatgtggcgttgtttttatcatttgacgtcccttgtagttactgaatctgacaccgaattccattcagaataatagattgtgctattttttctgcttctgggctttgttgataatgcgcaagacaacttacgggtttactttgttcgagccatttaatgctgatatttccctgctgctcaataccacgaacaaatgcttgtccaccctgtccaacattaccaatgacattgccttgctcatcataaatatctgcagcaaatggaatatttttaccatcacttcgtgtgatgttcataatggcactttgcccttgcacggtttcaaaatcagcaaagacgacactaccctgacgcggtacagctactgcactggtactttttaattcaacatcgttctcaagatcgttgatatccagcgcgatacggttttcatgataaggagaaagagcgctggtgacaccataaccccatcgatcgatagtactgttgccataatttattcgcgctccttgagcacctggagcctgaactaccgccagtgtatcggagtcgctaaaactatcattactgaaagtcagtccaccgctatgcaatacaaaaccaccgtcggtgctgagagaaacttgacggctgttatcgctatttgcagaaatactacctgccagcgttccccatggactctcatagctggcataacccccaacataactcaaatctttgctggctttattcatcgtatagccagtattcacgctataactgacgcgagcgttatcgctatagccactgctgctaacgttgagttggttattacccttaaagtcactgcttatttgagtatcaatactctggaaaccactagtacgttgttcagtgccaagtaatttttcaattggaatggtgaaactaagataaacgctatcgtcagtgtcgccgtcttcattccaactacgctgggcactgacactgtagctgccccaggatgtactgttactgtagccaatagagtaattgctacgattttgtccggaagcccagtaatcggaccaacttccggaaagataaaaactaccgtaatcttttttctcaaatttcaacggttggttaatactgaccgtaacctgatttttcatgcgactgtaattacgcatggatttcggttcaagatcttgttcgggatgtttcacttcatcaattagagttagtgcatcattaagaccaaggtaattctgtgtgctatagcgataggccgcgatattcagactagtacttgtttcttcgaataacttgttccaggaaacacgataactttgcccctggtatgttttatcatccgggatacgaacattggaatgagtcacatcgaaagaaaatgcaccaacactagtattcagaccaagacctaacaaaccagcggtatagttattatcggttatctgaataccggtataacccgtcagatagttattcaggccgtagtagtagcttgcttgaaataaattaggctcatcctgaatatcatcttttaagacctgaccgccgctaatatcccaacgtccaacgccagggcgtaacatttgaacaacggaactgaaaggttggctgaatgtccgcttactgccatcggattcttcgatggtaacaataagatcgctgccgtacccactcggactcagatcatcaatgacgaaagcgcctggcggcaccgtcgtttcataaatcttatagccaccttgcgtaatagtgactttggcgttggtattggcaacgccatgaatgataggcgcaaagctggctaaagtcggaggcaacatgcggctgtcactgtataaacgaatgcctcggatactgacggaatcaaaggtttcgcccgtcgtataagactcaccaagaatgagttgagaacgcaggctggcgatatcacgctgaacataccgattcttaaaatcataattactgccagaatcggtcatccagttgtagttgccgctggcacgcagtcgccatgcacctaaattcatcccaccgttaaatgcagcataaatgctttcattttttcgaccaggggtttcactatgatatccgttgaggttgtaactcaacatggccgcattaatgccgttttcccataagcttggatcaacatagttttggtaatttttcattacccaggcttgaggaacgtctatatccagacgttgatcgttaacgtcataacgaacagaagcctgagggataatttccgtcaaattgaggcaattgccgagcgtttcatccctggcaagcagaacggctttttcgttatttatatcgggagaattaatatgaaactgcaataaattctttaatgtgatacaagcctgggcgttcttttttccttcaattgcgacaaatgtaatactttggttaatgattggttggtcgtttacataaacactgacgtcgtaaacacccggtatagcggggttaccttcactgtaccggctgagatcaatattagatgcattctgccccatcaggaaggtatggtcatattcaacgagttcagcactgaaagcagtattgcaatacagcagcgcgcaaaacgtggcgatacgggtcagatgatgataatttttagtatattctatagtcacgctatgcttcctgcggaattatatccttgcctgattacagcctggcattaccttcaattgcgccaccaaagtcattaatggcgtaaaaatgcacttttgcagaattcgctttgccattaaggccattgactttcatgacctcatcactaaatggtgcaatcattttcacatcaatcggatagcgtttaccgctagcttctaaatcaccactgctaaaagagacgtagtaaggggttggattggtcactcgtaaactcgccttaccttcactaccactccagaaccacttcagggctaacggggcttcagagggatttcccttcaatccatccgggcgatagaaaagttttatacgtgtgcgaaatgccagttgcagcaggctttgattcgcgaccttttctgcatctggttttggtggaacttccagtacgttaaaccagaacacgctctctctgtctttaggcagactggtgctggctgtgtacattaatttgattgtttgcccacgtttggcatcaatacggcttactggcggcgtagcagtaaaagggactgtaatactgccaggctcagcgttgtcatcgccagtatctaaccaactctggacaagcaacgggttattccctttattttccagacgtacgttgacacttttttgatcgcttttatatattacgcgagtaccgctaatgacaatgtccgcaatagagctactactaaaagccatacaggttacgaagcataaagctgttgtatgtttggtgttaaaaaacataaaccatccctgatagagttaattaaaacagggaataatataaaatagaaattattattccctgtatattcattcaatcaatttaactggtgaatacttactgataagtaatggtgtatgcagtgttagtttttacataaccagcagttgctgtttggtctgcgacggcacgaacgtaagacgctttaaaatcataaacagcagattttgtcgttgcatccagggctttagtatacacatcgccagggttgttaatttgaacctgtttgatagtggaaccatcaatattgtgtagagcgatattaacgccgtcagatgggttgttaatagacatgtcgttgttcaaagtccctttgctgttaccaaagaaaacagaaccgaaggtcattttagccgtgctacctggattcggatttgctttgctgcagtcaacggtgatgctgaaaggtttagctttagcgccaacggtgtcattcagtacgccagcatcgatttcaccaacggttgcggtttgcagcaggatcagaccatccttgttaccgccgtcaacgcgggtttcacaggtgttatcaacaaccagaccactgatatttaactgaccgccgtccatatcagcagaagcagtacctgcaaccatcgccagcataagaccagacagggcaaaacctaattttttagacataaaaatcctttaataaaattccattagtcagactacatgtttgaagaatgactattcatgacacaaataggagaaacaaatgttagatattaatgagcaatgatatttgttacccaaatttacaaccattgttcattaggtcgcctattgtgcactttagaagcttttgaacaaattaaatttacttaattcaaaattaagtaaaaataagttcacaagtgcaattggttagggtatggagatgggattgatatttatttataggaagttatattatttccgcaaagagatgtttaaactaaaatcgtaattaaggaaagagatgagatatgattttcagaaaatatttatattcgcaatataaataaattaccatttgtttaatttgtcaaatgctcttgtatgtaagatttgacgcaacatctccccatcaggaaacaccaactccggcgcgatttcaaacagcggccacagcataaatccacgattcttcatatcgtagtgcggaacggtcaggcgttcagtatttatcacttcattaccaaacagcatgatgtcgagatccagcgtgcgtggtccccagcgttcagctttgcggacgcgaccttgctgcaattcaatacgctgtgtgtgattgagtagctcttcaggtgcaagagaggtttccagcgccacggctgcgtttaagtaatcgggttgatcttgcggccccagcggtggggtgcggtaaaagctagaaacggtaagaatgtggctttcagggatatcgcctaatgctttcagggcagcattgacctgctccagcggagaggccagattgctgcctatggcaatatacgccactgtcatgcggtaccctcacgacgtggtgcgcgtttgcgtggacgacgagtacgacgacgcggactcggttcttcatccagctcgttgagcatccctttttggtctggtggcgcggaaacctggaactcaccccaccatttcaccagacgctgcagttcagcgttacgctcaacttcagctcgcaaggccaacaggtcataagccgcacggaacttaggatgctccagcagtttccatgcgcgtttaccctgacgacgggacatacgcaactgcaactgccagatatcgcgggttaatgtcgtcagacgtttcgggattgccagactacggcaggcttcgtccagcacgtcgttcatcgccagcgcgaaagcgtcgtgataggtcaggccgctttcctgggcgatcttctgtgccgtctccagcagtgggtaccagaacatggcggcaaacaggaacgccgggttcacgcgcatatcgttatggatacgcgtatcggtattcttcagcacctgttcaatgatccgctccatcgggctgtcgccattttccgtgaagtagcgggtaatggtcgggaacagcggctggaacagatgatattcacacaacagcttataggtttcgtaaccgtagcccgcttgtagcagtttaaggctttcttcaaacaggcgtgccggtgggatatcgttcagcagggtagcgaggcgagggatcggttctgcggtttccgggctgatgcgcatacccaatttggcggcaaaacgtaccgcgcgcagcatacgtaccggatcttcacggtagcgcgtttccgggttaccaatcagacggataacgccgtccttcagatccttcatgccgccaacgtaatcacggacggtaaaatccgctacgctgtaatacaggctgttgatagtgaaatcgcggcgctgggcgtcttcttcgatggagccgaaaatgttgtcgcgcagcaacatgccgttttgcccgcgttgggaggtcgtgcggtcgctgacgttaccttcgtggtgtccacggaaggtcgcaacttcgataatctccgggccaaacattacatgagccagacggaaacggcgacccaccaggcggcagttacggaacagtttgcgcacctgctcaggcgtggcgttagtggttacgtcaaaatctttcggctttttgccaagtaacaggtcgcgcacgccgccgccaaccagccaggcttcgtatcccgctttattgagcctgtacattaccttcagggcattttcactgatatctttgcgggaaatagcatactgctcacgcgggatcaccgtcacctgtggacgggcgactgcctgttcagcctcgctttcctcgcggcttagcaccttgcggcaaaaattagcgactcgggtaaaaatagtacacctcggtagtgtcaaacatcattcaggacaaaaaaatagcggctaatcatagctcagcaactcgcattactgaatgtactatttacaattgcgctctcgggcacggcggtaagccgccagtttttgacggcactctgaaggatttgctcgacgctgaaatcctgccagtgtgcttctgcctgctgccccagaaattgaagtgccgcgattagtaccgggcgtggatcgcctttcggcaacgcaggcgcatgattctgcttggaaagtttagcgccttgtggattaagcgccagcggcagatgaatgtaatctggcactttccagccaaaaagctggtacaggctgatttgccttactgttggttcaatcagatcagccccacgcactatttctgtaacgccctggaaatgatcatcaaccacaacagccaggttgtaggcgaacaacccatcacggcgatgaatgataaaatcttcccgtgccagtttttcgtcggcgtgaataatgccgcgcagctggtcagtaaattgcgtgaccggatgctgctggcggatacgcactgcggcgttgtctggtccatgatgcaacacccggcaatgaccgtcgtaaataccgccaatgctttgaatacgcgcacgcgtacaggtgcagtaataacttagtccttgttcatgtaaccaggcgagtgcttcacgataggcgtcgtgacgttggctttgccagagaacatcgccgtcccagtgcagaccgtaatgttccagctggcgcaggatagtttctgcggcaccgggaacttcacgaggcgggtcgatatcttctatgcgtaccagccagcgaccttgccgggcgcgagcctgcaaatagctgccgagcgcggcgatcagagagccaaaatgaagctcgccggaaggagagggggcgaagcggccaatatactgtgtgtctgtcatctctttgaacaaaaaataaggcgggagcatttcccgcctgtggtaaacgtgatggaacggctgtaattagccagccatctgtttttcgcgaatttcagccagcgttttgcagtcgatgcacagatcggctgtcgggcgcgcttccagacggcgaataccaatttcaacaccgcaggattcgcagtagccgaaatcttcgtcttccacttttttcagcgtcttctcgatctttttgatcagcttacgctcgcgatcgcggttacgcagttcgaggctgaactcttcttcctgggctgcacggtctaccgggtccgggaagttggctgcttcatcctgcatatgtgtaacggtgcgatcgacttcatccctgagttgattacgccatgcttccagaatacgacggaagtgcgccagctgggcttcattcatatactcttcgcccggcttctcctgatatggttccaccccagcgatggcgagaatactcagggagcttgttttacggttttgcccttcttgcatgttgcttctccttaacacgcactatcgatccccatgttcgggggaaaaatgaggccgctataaatagcagatgcttttccggatagcaattatctaaacgtaacacttgacaactgtgtgaggaaaagcgtatttgcgcacgcgaccagaatgtaaattaaccagttacttactttattacaatgtaaccggcagactttttttaagagccatgccttcagcagaaatttccgctttgtaagccagaatttctacccccctctgttgagcttcactcaatagttgcgcgtatttctcatcgatgtggcgcgcgggactaaaccgtgtaatggcactatgcagcacggcgaaaaagataaccgcacgctggccttcagccgctacgctcatcaactcccgaaggtgtttctgacctcgttcagtgaccgcatcgggaaaatatccctgttcgttctccgctaacgtaacgcttttcacttcaatatagcagtctggacggctatccgcctgcaacataaagtcaatacggctgcgttctgcgccgtattttacttcgcttttcaggctgctatagccactcagttcactaatactttcattaaggatagcctctttcgtcaacctgttagcccaaagcgtgttgacgcaaataaatgcgccgctctggctttgagttaattcccaggtgtgtgggtatttccgtttggtgttgtcactagtgctataccagacggtatcgccaggcgttgcacaaccggtcatcgcacccgtattcgggcagtgtagcgttaattcgcgaccatcgggtgtgatcacatcggctaaaaaacgtttgtaacgctgaattagcgtcgcgcgctgtagagggggagaaaattccattgcgacaatccttgttattgcgttagcgcccagcgttttagcggcgtgtagcgtgtgcgtccacgggcaaagctggaggcgtaaagggtgaactccgtcaccgcatagctccagttaaaacctggcggcgggattgtcaccgcctcgctggcgtcgcgcaataaggtaatatgtggatgaaacggacgattgctttgaaaacaaccgctgcgggcagcctgactacggagcatattcgccagctggattaagccgcgtggcggctgacgcatccctaaccacaccacacggctacgcagccattgtccggcgtcatcaagcgtgagtgtgaaaccaggttgacgaatccgtccggctaaaagagaaagcgccttctctttctcggcgctcacttcgcctaaaaatgccagagtcagatgcaaattatcggcggcgaccggacgtcccgcctcaggtgggaagtgtgtggcgcgccaatggataatctgttcgcggatttctgcaggtaagtcgatagcaaagaacagacgttgcggttcagacatgtgaggcactcggttatgaattaccgcgatgctacaatgtggcgcgaagaatgttaaccctctggagcgttttgtgagcagcttgcccgttgctgccgtcttacctgaattacttaccgctctcgattgtgcgccgcaggtattattaagtgcgccgaccggggccgggaaaagtacctggctgccgctgcaactgctggcgcatcccggcattaacgggaaaattatcctgctggagccgcgtcgtctggcggcgcgtaacgtcgcgcaacggctggcggagctgcttaacgaaaagccaggcgataccgttggctaccggatgcgtgcgcaaaactgcgtcgggccgaatacccgcctggaagtggttaccgaaggcgtgctgacgcgcatgatccagcgtgacccggaactgagcggtgttggactggtgatccttgatgaatttcatgagcgcagcttgcaggcggatttggcgttggcgctgttactcgatgtgcaacaaggtctgcgtgatgaccttaaactgctgattatgagcgctaccctggacaacgaccgcttgcagcaaatgctgccagaagcgcctgtcgtcatcagtgaagggcgcagctttccggttgaacgccgttatttaccgctgcccgcgcatcagcgttttgacgatgccgttgcggtagccaccgctgaaatgctgcgtcaggaaagcggaagtttactgttatttttacctggcgtcggagaaattcagcgtgtgcaggaacaactggctagccgcatcggcagtgatgtattgctctgcccgctgtatggcgcgttgagcctgaacgatcagcgaaaagcgatcctcccggcaccgcaagggatgcgcaaagtggtgctggcgaccaatattgctgaaaccagtttaaccattgaaggtattcgtctggtggtggattgtgcccaggagcgtgtggcgcgttttgatccgcgcacggggcttacgcgactgattactcaacgcgttagccaggcatccatgacgcagcgtgccgggcgcgccgggcgtctggagccgggtatcagcctgcatttaatcgccaaagaacaagcagaacgcgccgcggcgcaaagtgaaccggagatcttacaaagcgatctttccggtttgctgatggaattactgcaatggggatgcagcgatccggcgcagatgagctggctggatcaaccgccagtagtgaatctactggccgcgaaacgtctgttacaaatgctgggggcactggagggtgaacggcttagtgcgcaagggcaaaaaatggcagcgctgggtaacgatccgcgtttagcggcaatgctggttagcgcgaagaacgacgacgaagctgctaccgcggcaaaaattgccgccattctcgaagagccgccacggatgggcaatagtgacctgggcgtggcgtttagccgcaatcaaccagcctggcagcaacgtagtcagcaactgttaaaacgcttaaacgtacgtggcggtgaggcagacagtagccttatcgcgccgctacttgccggggcgtttgccgatcgcattgctcgtcgccgtgggcaagatggacgctatcaactggcaaacggcatgggagcgatgctcgatgccaacgacgcgctaagccgccacgaatggttgatcgcaccgttattattgcagggcagcgccagcccggatgcgcggattttactggcgctgctggtcgatattgatgagttagtacaacgctgcccgcagctggtacagcagtctgacactgtggagtgggatgacgcgcaaggtacgctgaaagcctggcgtcggctacaaatcggtcagttgacggtgaaagtgcagccgctggcgaaaccgagtgaagacgagttgcatcaggcgatgcttaatggcatccgtgataaaggtttaagcgtgctcaactggacggcggaagcggaacagctacgcttgcgtttgttatgcgccgcaaagtggttgccggaatatgactggccagcggttgatgatgaaagtttattggcagcgctggaaacgtggctgctgccacatatgactggcgtacatagtctacgcggcctgaaaagtctcgacatttatcaggcactacgcggattacttgattggggaatgcagcaacgtctggatagtgaattgcctgcgcattacactgtgccgacgggaagccggatcgccattcgttatcatgaagataacccgcccgcgctggcggtgagaatgcaagagatgtttggcgaggccaccaatccgacgatcgcccaggggcgcgtgccgctggtgctggagttgcttagtcctgcccaaaggccattacaaatcacacgagatttgagcgacttctggaaaggagcgtaccgtgaggtgcaaaaagagatgaaagggcgttatcccaaacatgtctggccggacgacccggcaaatactgcaccgacgcgacggacgaaaaagtatagctaaggttggttttctccctctccctgtgggagagggccggggtgagggcatcagcgcgcacgttcaccctcaccctaaccctctccctcaagggagaggggaccgatcgagcacaaattttgagagatatcttcttctgtcttgtaacagaagaacagaaaatcgggcttttgcgcctgaatattgcggagaaaaagcatggccgggaatgaccgcgagccaattggacgcaaagggaaaccgacgcgtccggtcaaacaaaaggtaagccgtcgtcgttacgaagatgacgatgattacgacgattatgatgactatgaggatgaagaaccgatgccgcgcaaaggtaagggcaaaggcaaagggcgtaagcctcgtggcaaacgcggctggctatggctactgctaaaactggctatcgtttttgccgtgctgatcgccatttacggcgtttatctcgatcaaaaaattcgtagccgtattgatggcaaggtctggcaactgcctgcggcagtttatggccgaatggtcaatcttgagccagacatgaccatcagcaagaacgagatggtgaagctgctggaggcgacccagtatcgtcaggtgagcaaaatgacccgtcctggcgaatttaccgtgcaggccaacagcattgagatgattcgccgtccgtttgatttcccggacagtaaagaaggacaggtgcgcgcgcgtctgacctttgatggcgatcatctggcgacgatcgtcaatatggagaacaaccgtcagttcggtttcttccgtcttgatccgcgtctgatcaccatgatctctagcccaaacggtgagcagcgtctgtttgtgccgcgcagtggtttcccggatttgctggtggatactttgctggcgacagaagaccgtcatttttacgagcatgatggaatcagtctctacagtatcggacgtgcggtgctggcaaacctgaccgccggacgcacggtacagggtgcgagtacgctgacgcaacagctggtgaaaaacctgttcctctccagcgagcgttcttactggcgtaaagcgaacgaagcttacatggcgctgatcatggacgcgcgttacagcaaagaccgtattcttgagctgtatatgaacgaggtgtatctcggtcagagcggcgacaacgaaatccgcggcttcccgctggcaagcttgtattactttggtcgcccggtagaagagctaagcctcgaccagcaggcgctgttagtcggtatggtgaaaggggcgtccatctacaacccgtggcgtaacccaaaactggcgctggagcgacgtaatctggtgctgcgtctgctgcaacagcaacagattattgatcaagaactctatgacatgttgagtgcccgtccgctgggggttcagccgcgcggtggggtgatctctcctcagccagcctttatgcaactggtgcgtcaggagctgcaggcaaaactgggcgataaggtaaaagatctctccggcgtgaagatcttcactacctttgacagcgtggcccaggacgcggcagaaaaagccgccgtggaaggcattccggcactgaagaaacagcgtaagttgagcgatcttgaaactgcgattgtggtcgtcgaccgctttagtggtgaagttcgtgcgatggtcggaggttctgagccgcagtttgcgggctacaaccgtgcgatgcaggcgcgtcgtagcattggttcccttgcaaaaccagcgacttatctgacggccttaagccagccgaaaatctatcgtctgaatacgtggattgcggatgcgccaattgcgctgcgtcagccgaatggccaggtctggagtccgcagaatgatgaccgtcgttatagcgaaagcggcagagtgatgctggtggatgcgttgacccgtagcatgaacgtgccgacggtaaatctggggatggcgctggggctgcctgcggttacggagacctggattaaactgggcgtaccgaaagatcagttgcatccggttccggcaatgctgctgggggcgttgaacttaacgccaatcgaagtggcgcaggcattccagaccatcgccagcggtggtaaccgtgcaccgctttctgcgctgcgtagcgtaatcgcggaagatggcaaagtgctgtatcagagcttcccgcaggcggaacgcgctgttccggcgcaggcggcgtatctgacactatggaccatgcagcaggtggtacaacgcggtacgggtcgtcagcttggggcgaaatacccgaacctgcatctggcagggaaaacagggactaccaacaataacgtagatacctggtttgcgggcattgacggcagcacggtgaccatcacctgggtcggccgtgataacaaccagccgaccaaactgtatggtgccagcggggcaatgagcatttatcagcgttatctggctaaccagacgccaacgccgctgaatcttgttccgccagaagatattgcagatatgggcgtggactacgacggcaactttgtttgcagcggtggcatgcgtatcttgccggtctggaccagcgatccgcaaagcctgtgccagcagagcgagatgcagcagcagccgagtggcaatccgtttgatcagtcttctcagccgcagcaacagccgcaacagcaacctgctcagcaagagcagaaagacagcgacggtgtagccggttggatcaaggatatgtttggtagtaattaacatctaagcgtgaaataccggatggcgagttgccatccggtaaaataacatcccatctaagatattaaccctttcttttcatctggttgtttattaacccttcaggaacgctcagattgcgtaccgcttgcctgtaagactcaatgtaagccgtgccaaaatatgatggctaggacgagctagaacccgccagcgtttcgaatattatcttatctttataataatcattctcgtttacgttatcattcactttacatcagagatataccattccatataacggccctgtacgcctggacggataaagcgtttacgcgacaacggatgcccgatgcgacgctggcgcgtcttatcgggcctacaaacggccccgaatcgtaggtcggataaggcgttcacgccgcatccgacaaaccatgctggatcacaacttcgcaaacacccgacgtgcagcatcgatggtgttattgatatcttccatgctgtgcgccacggacataaagcccgcttcaaacgcactcggtgccaggtaaacaccttcgtccagcatcatatggaagaaacgcttaaagcgttccacgtcacaggccatcacatcctgatagcacgtcacggactcggcgtcggtaaagaaaataccgaacatgccgccaacgtggttaacgaccagcggaattccggcttcttctgccgcttccagcagaccttctgccagacgtgttgtcagctcatccagcgtttcgtgaacgcccggctgcgcgacttcattcagacaggcgaaacccgctgccatcgcaatcgggttaccggaaagcgtacccgcctgatagaccggacccgtcggggccagcgcatccattacatcacgacgaccaccgaatgcgcctaccggcattccaccgccgatgattttgccgaggcaggttaaatctggcactacgccgtaataatcctgtgcgccagctagcgctacgcggaaaccggtcatcacttcatcgatgatcagcaacgcgccaaattcgtcgcacagcgcgcgcagacctggcaggaactctggcagcggcggaacacagttcatattgcctgccaccggctcgacgataatacaggcaatctcttgcgggtattgctcaaatgcggcgcgtacagaagccagatcattataagtacaggttaaggtatatttggcgaaatctgccggaacgcccgggctgtttggctggcctaacgtgagtgcgccagaaccggctttcaccagcaggcagtcagcgtgaccatggtaacacccttcaaatttaataattttgtcgcgaccggtaaaaccacgggccaggcggatggcgctcatggtcgcttcagtgccggagttcaccatgcgcaccatatccatggtcgggaccagttcggtcaccagttgcgccattttcacttccatttcggttggtgcaccaaagcttaaaccacgctcggcggcttcaatcacggcattgcggattgccggatggttatggcccagcaccatcggcccccaggaaccgacataatcgatataggctttgccatcaacatcgtacagataagcgccgtccgctttttcgataaacagtggagtgccgcccacgccagtaaaggcgcgaacaggggagttcacaccgccagggatcagctcgcgcgctgcgctgtaaagattttcagacttactcatggagggttcctgattcgtagaaaaagtgaatggctgctattctatgttattcataacaagttaaatactcgtcaaacatcaggctgcttgtactggtgcaatcctgatttcttagagtataaaagttttgtgcatttgaaacattacgctttgcaaaggattttcatggaacgtgcgagtaaaatgccgtcatcttatttgtatgaccaataagtgatcattggatgaaaactgatactccctctttagaaacaccgcaggccgcgcgcctgcgacgcagacaactgattcgccaacttcttgagcgcgataaaaccccgttagccattttgtttatggcggcagtcgtcggcacgcttgttgggctggcagcggttgcttttgacaaaggtgtcgcctggttgcagaaccaacgtatgggggcgctggtacatactgctgataattatccgcttctgttaaccgtcgcttttctctgtagcgcggtgctggcgatgtttggctactttttggtgcgcaaatacgcgccggaagcaggtggtagcgggatcccggaaattgaaggggcgctggaagatcaacgtcccgttcgctggtggcgtgtattgccggtgaagttctttggcgggctggggacactcggcggaggcatggtgttggggcgcgaagggccaaccgtgcagatcggcggtaacattggccgtatggtgcttgatattttccgcctgaaaggtgacgaagctcgccatacgctgctggcaaccggtgctgctgcggggctggctgcggcctttaacgcgccgctggcgggtattttgtttattatcgaagagatgcgtccgcagtttcgctatacgttaattagcattaaagcggtatttattggtgtcattatgagcaccattatgtaccggatttttaatcatgaagttgcgttgattgacgtcggtaaactttctgatgcgccgcttaatacgctgtggctttatctgatcctcggtattatttttggcattttcggccctatttttaataaatgggtgctggggatgcaggatttgctgcaccgtgtgcacggcggcaatattaccaaatgggtgctaatgggcggtgcgattggcggtctgtgtggattgctggggtttgtggcaccagcaacgagcggcggcggttttaacctgattcctatcgctaccgcggggaatttcagcatgggaatgctggtgtttatcttcgtcgcgcgggtcattaccaccttactctgcttctcttccggcgcgccgggcggtatttttgccccgatgctggcgctgggtactgtgctgggaaccgctttcggaatggttgccgttgagctgtttccgcaatatcaccttgaggcggggacgtttgctattgccggaatgggggcattactggcggcatctattcgcgcgccgttaacggggatcattctggttctggagatgaccgataactaccagctcattttgccaatgattattaccggtcttggcgcaacactattagcgcaatttaccggcgggaaaccgctatacagcgcgattcttgcgcgcacgctggcaaaacaggaagctgagcaactggcgcgaagcaaggccgcaagtgccagcgagaatacttgaacgaaataccagggtattagataatggcgattattattgggttagaatttgcccaattgccgatgtcgtttggagcaaaatatgagtgatgacgtagcactgccgctggagtttaccgacgcagcagccaacaaagttaaaagcctgatcgctgacgaagataacccgaatctgaaattacgcgtgtatatcaccggtggcggttgcagcggcttccagtatggtttcacctttgatgatcaggtgaacgaaggcgatatgaccatcgaaaaacagggcgttggcctggtggttgatccgatgagcctgcaatatctggtcggcggttccgttgattataccgaaggtctggaaggttctcgtttcatcgtgaccaacccgaacgcgaaaagcacctgcggttgcggttcttcctttagtatctaatctgttgttcatgtgccggataaactatccggcacatcttctctcttcaacgcccattctcatccagcgcaaacgtcggtagcttaagatgccaacgaatagccgccagccgaatcaatagcgtcacgaccatgcccatcatactggctgtttccagtggtacggaaaatgtgtaataagccgtagcgtggacaataccgccgataatacaggcagttgcgtagatttctgtacgtaaaatcatggggatttcgcgggccagaacatcacgaatgatcccgccgccaacgccagtaatgacgcccatacaaaccgcgattaacggaccggcttccgcattaaaggctttattcacgccaatgccgacaaacaccgccagaccaacggcgtccagcaccggcaacatccattttggtaagcgtcttggctggcgcaccagcacgatggtcagcatgctggtgaccattgcaacgaccagatcggtgggatctttcacccaaaataccgggccgtgatccagcgccatgtcgcgaattgtcccgccgcctactgcggttaccacgcccagtaccagaacaccaaaagggtccatacgcaattttccggctaacaaaacgccggagatggcaaataccgctgtgccgactatatccagccaatagacgagcattgttcaatccccactgagcacctgaaaaggtcaggcgttaatctacctgactaagcgcattacagagctgttgtgcagcgaggataatacgtgggcttgcacgttcaaaccagtcactcgtgagaggaataacgggaattttgagctgttcaccccagtattgtttgattttaggaatttggtccggtccgcctgtaatgacaatcgcctgtgggctgcgtgctaacacctgttcgcggctaacttgcggccagggaacccggctgtctttaaagatgttttctccgccacaaacttcgagtacctggttctgaatgctctcttttccactggtaaatggcggattaatgccgaattgcagaaaaacacgttttttaggtttatcagcatattgcgctttcaattgcgcgtactgatccagcagggattgcgcggcttgttcggccttgtctggttgcggactccagggggccagttgacgtaacgcattggcaatttgttcaatgcttgtcgcatcgacccacatcacttttattcccaggctagccagctggtcaacctgccgctcggcattacctccacgccaggcaatcaccagatcgggtttcagcgcgacaatgcgttccagattcatcccctgccaggtggaaacctgctcaatcttttgcgcttgtggaggatagtcggaatagctgctgaccccaaccggcgtgatcccggcggcaaaggcaagttcagtgttggcgggagaaagcgtgatgacgcgcggcgcggcgttgagccacagtggcgcaagaaaagacagggcgaccagcgccctgaacagactcttagccatgtgcaagtttctgcaccagactctcaaccatcaggctggactgtttagcggcaacagccaggaactcatcgaagctaagatgagactgttgatcggccacgtcggagatggcgcgtacgacaacaaacgggacgttgaaattgtggcagacatgggcgattgccgtcgcttccatctctacagcaatggcctgtgggaagttgtggcggattttcgccagaccaacagaaccgttgatgaaagcgtcgccgctaacaatcaggccacgtacagcgttaagattcagttcggcaatgcaggcctcagcggcagcgatcagtttatcgtcagctttaaagcctgccggacagcctggtaactgaccgtattcataaccaaatgccgtgacatccgcgtcgtgataacgtgcttcgtcgctgacaacgatatcgcccactttcaacgttggtgccaggccaccggcagaaccggtgttaataatcacatctggcttgcagtgttccaacagcaaagtggcacccagcgccgcagcgactttaccgatgccgcttttcagaagcgcaacctcggttccattcagttggccggtatagatttcgcaaccgccgagactgatagtttgacggttttcgattttgtcacgcagcagcgtaacttcttcttccattgcaccaatgatgccgattttcatagatttactcgcgataagcccgatttgaaggcatagtttaccatgcgcttacggggaagcgtatttctcacgcgggagaggacatggcacagattgatttccgaaaaaaaataaactggcatcgtcgttaccgtagtccgcagggcgttaaaaccgaacatgagatcctgcggatcttcgagagcgatcgcgggcgtatcatcaactctccggcaattcgtcgtctgcaacaaaagacccaggtttttccactggagcgcaatgccgccgtgcgcacgcgtcttacccacagcatggaagtccagcaggtggggcgctacatcgccaaagaaattttaagccgtctgaaagagcttaaattactggaagcatacggcctggatgaactgaccggtccctttgaaagcattgttgagatgagttgcctgatgcacgatatcggcaatccgccgtttggtcattttggcgaagcggcgataaatgactggtttcgccaacgtttgcacccggaagatgccgaaagccagcctctgactgacgatcgctgcagcgtggcggcactacgtttacgggacggggaagaaccgcttaacgagctgcggcgcaagattcgtcaggacttatgtcattttgaggggaatgcacaaggcattcgcctggtgcatacattgatgcggatgaatctcacctgggcacaggttggcggtattttaaaatatacccgtccggcgtggtggcgtggcgaaacgcctgagacacatcactatttaatgaaaaagccgggttattatctttctgaagaagcctatattgcccggttgcgtaaagaacttaatttggcgctttacagtcgttttccattaacgtggattatggaagctgccgacgacatctcctattgtgtggcagaccttgaagatgcggtagagaaaagaatatttaccgttgagcagctttatcatcatttgcacgaagcgtggggccagcatgagaaaggtagcctctttagcctggtggttgaaaatgcctgggaaaaaagtcgcagtaatagtttaagccgcagtacggaagatcagttttttatgtatttacgggtaaacaccctaaataaactggtaccctacgcggcacaacgatttattgataatctgcctgcgattttcgccggaacgtttaatcatgcattattggaagatgccagcgaatgcagcgatcttcttaagctatataaaaatgtcgctgtaaaacatgtgtttagccatccagatgtcgagcggcttgaattgcagggctatcgggtcattagcggattattagagatttatcgtcctttattaagcctgagcttaagtgactttactgaactggtagaaaaagaacgggtgaaacgtttccctattgaaagccgcttattccacaaactcagcacgcgccatcggctggcctatgtcgaggctgtcagtaaattaccgagtgattctcctgagtttccgctatgggaatattattaccgttgccgcctgctgcaggattatatcagcggtatgaccgacctctatgcgtgggatgaataccgacgtctgatggccgtagaacaataaccaggcttttgtaaagacgaacaataaatttttaccttttgcagaaactttagttcggaacttcaggctataaaacgaatctgaagaacacagcaattttgcgttatctgttaatcgagactgaaatacatgaaaaaaaccacattagcactgagtgcactggctctgagtttaggtttggcgttatctccgctctctgcaacggcggctgagacttctagtgcaacgacagcccagcagatgccaagccttgcaccgatgctcgaaaaggtgatgcctagtgtggtcagcattaacgtagaaggtagcacaaccgttaatacgccgcgtatgccgcgtaatttccagcagttcttcggtgatgattctccgttctgccaggaaggttctccgttccagagctctccgttctgccagggtggccagggcggtaatggtggcggccagcaacagaaattcatggcgctgggttccggcgtcatcattgatgccgataaaggctatgtcgtcaccaacaaccacgttgttgataacgcgacggtcattaaagttcaactgagcgatggccgtaagttcgacgcgaagatggttggcaaagatccgcgctctgatatcgcgctgatccaaatccagaacccgaaaaacctgaccgcaattaagatggcggattctgatgcactgcgcgtgggtgattacaccgtagcgattggtaacccgtttggtctgggcgagacggtaacttccgggattgtctctgcgctggggcgtagcggcctgaatgccgaaaactacgaaaacttcatccagaccgatgcagcgatcaaccgtggtaactccggtggtgcgctggttaacctgaacggcgaactgatcggtatcaacaccgcgatcctcgcaccggacggcggcaacatcggtatcggttttgctatcccgagtaacatggtgaaaaacctgaccagccagatggtggaatacggccaggtgaaacgcggtgagctgggtattatggggactgagctgaactccgaactggcgaaagcgatgaaagttgacgcccagcgcggtgctttcgtaagccaggttctgcctaattcctccgctgcaaaagcgggcattaaagcgggtgatgtgatcaccagtctgaacggtaagccgatcagcagctttgccgcactgcgtgctcaggtgggtactatgccggtaggcagcaaactgaccctgggcttactgcgcgacggtaagcaggttaacgtgaacctggaactgcagcagagcagccagaatcaggttgattccagctccatcttcaacggcattgaaggcgctgagatgagcaacaaaggcaaagatcagggcgtggtagtgaacaacgtgaaaacgggcactccggctgcgcagatcggcctgaagaaaggtgatgtgattattggcgcgaaccagcaggcagtgaaaaacatcgctgaactgcgtaaagttctcgacagcaaaccgtctgtgctggcactcaacattcagcgcggcgacagcaccatctacctgttaatgcagtaatctccctcaaccccttcctgaaaacgggaaggggttctccttacaatctgtgaacttcaccacaactccatacatcttcatcatcctttaggcatttgcacaatgccgtacgttacgtacttccttatgctaagccgtgcataacggaggacttatggctggctggcatcttgataccaaaatggcgcaggatatcgtggcacgtaccatgcgcatcatcgataccaatatcaacgtaatggatgcccgtgggcgaattatcggcagcggcgatcgtgagcgtattggtgaattgcacgaaggtgcattgctggtacttagtcagggacgagtcgtcgatatcgatgacgcggtagcacgtcatctgcacggtgtgcggcaggggattaatctaccgttacggctggaaggtgaaattgtcggcgtaattggcctgacaggtgaaccagagaatctgcgtaaatatggcgaactggtctgcatgacggctgaaatgatgctggaacagagccggttgatgcacttgttggcgcaggatagccgtttgcgggaagaactggtgatgaacctgattcaggcagaggagaatactcccgcacttactgaatgggcgcaacggctggggatcgatctcaatcaaccgcgagtggtggctattgttgaggtcgacagcggtcagcttggcgtggacagcgcaatggcggagttacaacaactgcaaaacgcgctgactacgcccgagcgtaataatctggtggcgattgtcagcctaaccgaaatggtggtgttgaaaccggcgttgaactcttttgggcgctgggatgcagaagatcatcgtaagcgagttgaacaactgattacccgcatgaaagagtacggccagctgcgttttcgcgttagtctgggcaactattttaccggtcctggcagtattgcccgatcctatcgtacggcgaaaacgacgatggtggtgggtaaacagcggatgccagaaagtcgctgctatttttatcaggatctgatgttacctgtgttactcgacagtttgcgtggcgactggcaggccaacgaactggcgcgaccgctggcgcggctgaaaacgatggacaataacggcttgctgcgacgaacgctggcggcgtggtttcgccacaatgtgcaaccgctggcaacgagtaaggcgttgtttattcatcgtaataccctggagtatcggcttaatcgtataagcgaactgaccgggcttgatttgggcaattttgatgacaggttgctgctgtatgtggcgttacaactggatgaagagcggtaagttatgcgttaaggttgaggcggcgctggctcattcccctcagcccgaagggtagaggggaatgcccgaattaaccgtcagttcgggattatttacgcgttagtttttccagatcggcttcaatctcgctgatcttattggttacgacactctccaggtgacgtaagtcgtcgaggatcttacgcttaagatcaacttcgctgcggtcacgctggcagatttgatcaagctcatcaatgatataccgtagattcgggctgatttcctggacttctttataaccctgacccacaccatcagcgacgaccgttttacgctgacgcggatatttaaacttaacgctcttggcgaaaaactcgcctttgtctttctggaaatagattttcagaatatcgttgttggcttcctgccggaggctgtaacgatcaatttcttcaggattggtaatacccagacttttcagattgtcgtacatagcgttacctcaaaatgagtcagtaaattgtgcttattttagcatttggcctggcccgcccggctcgactgtgatcgcagaaagcctttttcttccagacttctatcatggcgtaaaaatcaaaaaattacctgctttattctggtgataaaattcacgatttacaccagttccagcatcgttacttccgggcggcagttcagacgcaaaccatacaaactgcccacgccacgggttgtgtagatgtgtctttcgccaaaggcatttaatccggcgacgtaacgtttatcttcgacaggggcaaaaggttcaccaaccaacggtacgcgcagttgcccgccgtgagtatggccgcacagcatcagatcccagggttcatcacgcatgacttctttgctgtcgggattatgcgccagcaccagtcttggcagattggcttcgctggcgggaggcggtttgcattgtccggcccataagtcaccagtgcctaccagttcgaattgcctgttcggcgtggcgatcaccgtagcctggttaaacaacaccgtgatgcccgcacttttcaacgtctcgccaattaagtgatttttttctgtaccaacagggcgatcgtggttgccgaagcaggcaaacgtcggcgcacattcggcaaggggggagagtacgtcactaaacgcgctaaaattcaggctcatatcaaataatacgtaatcgccgcccagtaatatcaaatcgggcttttgttctatgccaagagcaatcgcgtcagaaatcaggcttaaaggaacaaaacgagagtaatggagatcggccagaaaaagaattttgaatggtgctgcgttgtctttaaaaaaggcgaggcggtgacggattaattcaaaccagcctggctcacagtaatgcatataaccgaaaccactgctcgtggctatcgtcgcggcagtagcctgcaaaaatcggcggcgactaatcatcgctcatccctgcaaaaaaatcgggcagcgtcgtgctgcccgtgtgcatacttttagtcgatggtacgcagcagttcgttaatgccgactttgccgcgagttttcgcgtcaactttcttaacgataaccgcacagtagaggctgtatttgccatctttactcggcagattaccactaacaaccacagaccccgccggaacgcgaccgtagtggatttcgccggtttcacggtcgtaaatacgggtgctctgaccaatgtatacgcccatggaaatgacggaaccttcttcgacaatcaccccttcaaccacttcagagcgcgcgccgatgaagcaattatcttcaatgatggttgggttagcctgcagcggttccagcacgccgccgatgcccacgccaccggaaaggtggacgtttttaccaatctgcgcacaagaaccgacggtcgcccaggtatcaaccatggtgccttcatcaacatatgcgccgatgttgacgtaagacggcatcagcacggtgttacgggcaataaacgcaccctgacgtaccgccgctggtggcacaacgcggaagccttctttctggaaacgtgcttcgtcgtagtcggcgaatttcatcggcactttgtcgaagtagcggctttctgccccttcgatcacctgattatcattaatacggaaagagagcagcaccgcttttttcaaccactgatgcgtcacccactgaccgtcaattttttccgctacacgcagtgcgccggaatccagcagggcgatcacctgatttaccgcttcgcgggtaacggtgtctgcattggctggcgtgatctcggcacggcgttcaaaagcggtttcaataatgttctgtaactgctgcattgttaaactcttttcatatcagtaaacacatcaccctttatcgtttggattgagggcctctgtcaaccgctgatgcacttcctgctgcaactcgttattaagcgcacgccggtcagcggtggcaattatgaataaatcttctactcgctcgccaatggttgtaattcgggcaccatgaaggctaattcccagatcggcaaaaattttcccgactcgcgccagcagtccaggttggtcgagggcgatcagttcgaggaagcttttgcggtcggtatgggtcggcaaaaacgttacttcggtttcaacagtaaaatggcgtaatttggcgggttggcgacggggctgcggtggctgccagctactttgcgtcagtacttgctccagaccaaaccgaataacctcatgacgatctgcggacagcgggttgccatcgggttccagcacgataaaggtatccatcgccataccgtcgcgagtggtgaaaatttgtgcgtcgtgaacacttaaattgcggcggtctaattcggcacagacggcggcaaacagataagggcggtccgggctccagataaaaatctcggtgcctccacgcgtagcctgcgggctaagcaataccagcggtttgcttaaatcatgctgtaataaatggcgggcatgccaggccagttgatttgggctatggcggacaaaatagttagcacgacagcgactccaaatttggtgcagcgcctcttcgtcgatgttatccatgcgcagtagtgccagtgcctggagttggtgatggcgaacccgttcgcgcatatccggcgtgttttgcattccgcgtcgtagctgcttttcggtggcaaagtagagctcacgcaacagactttgcttccagctattccacagcgtttcgttggtggcgcaaatgtcagccacagtcaggcataccagatagcgcagacgattttccgtttgcacttcttcggcaaactgcttgatgacttccgggtcctgaatatcgcggcgttgggcggtcacgctcatcaacaggtgctggcgaaccagccaggcgaccagctgtgtttcgcgactgttcagcccgtggagttcggcaaaatgcactacatcctgagcaccgagaatggagtggtcgccgccgcgtcctttggcgatatcgtgaaacagcgcggcgatgaaaatcagctcagtactcggcaggcgcggccagacgtccacacacaacggatggcgctggcgcgtttcttcactggcaaaactctccagtttcagcatcacgcggatagtatgttcatccaccgtgtaggcgtggaacagatcaaactgcatctgcccgacgatatggctccattgcggcatatacgcgccgagcacgctatggcgatgcattggcaatagcccgcgccgcaccgctccggggtgacgcagaatgctcaaaaacagttttcgtgcttccggaatattacacagcggttgttgcagatggcgacgggcatggcgtaactggcgcagcgtggtggagtaaatgccggtgatcgcactgttgtgcaccatggtgtagaacatacgcaagatggcttccggctggcgcataaatagtgtttcatcacgcaggtcgattagcgtaccgcgtagctgaaactcatcgtcgattggacgtggtttttcgtcggcgggaagggcgaggatggcttcatcgaacagttgcagcagcatctggttgagttcactgacgcggcgtgtaacgcggaagtaatccttcatcatccgctcgaccggttcgttaccttcaccactgtaattcagacgctgggcgacgctaagctggcgatcgaataacaggcgattatcgtaacggctgacgaccagatgcagggcaaagcgaatacgccacaatatatgcagacattcgtttaattccgcccgctccgcactggttaagaagccaaacccgaccatttcatccaggcttgttgcgccaaaatgacggcgggccacccattgcagagtgtggatatcgcgcaagccgccagggctgcttttgatgtctggttcaaggttgtagctggtgccatggtaacgctgatggcgctggttctgttcttcaactttcgccgcgtagaacttgtcggaaggccagaatccttcgctgaaaatatgtttttgcagttcgaggaacagcgcaacatcgccaattaataagcgggattcgattaaattggtggcgacggttaaatcgcttaacccttccagcatgcactcttcaagcgtgcgcacgctatgaccgacttccagctttacatcccagagcagcgttaacagctcgcccactttttgcgcctgatcgtccgggagctttttacggcttaaaatcagtaaatcgacgtcactaagtggatgcagctcgccacgaccgtagccaccgacggcgaccaatgccaggtcggcaatctggctgaatcccgcttcaatccataatcgttgcaggagctggtcgataaactcggtgcgcgcctcaatcaactgttctgcagagatcccattgtcaaaggcatcacccagccaacgctggaaagtatcgatatgggcttttatcccaccgacggttaattcatcacggggccagacgcatggattttgcggttgaccgggcagggtggggagagcggtgtttgcgtactgttctggaagggtattcattgtgcgccacccataagattaaattatcgcattaaaaaagccggcattcgccggcttcatcttattcgtcgtggctgattatcgccgggatggtgtcatccttgcgtagcgtcagaatttcgcagccgttatcagtcaccacaatagtatgctcatattgtgcagacaagctgcgatctttggtttttaccgtccagccatctttcatggtgcggatctcttttttacccgcgttgaccattggctcgatggtgaacgtcatcccaggtttcagtacgacgttggtttcacgggagtcatagtgcagcacctgcggttcttcatggaagccgcgaccaataccgtgtccgcaatattcacgaacgacggagaagccttctgcttcgacaaatttctgaatcgccgcaccgatttcgcgcagattaatgcctggttttaccatgcgtagcgccaggtacaggctttcttgcgtgatgcggcacagacgttcgcccatgatggtcggcttaccgacgataaacattttgctggtatcgccgtggaaaccatctttgattacggtgacatcaatgttaacgatatcgccatctttcagcagcttagcatcgtccgggataccgtggcacaccacttcattaatagagatgcaaacggatttcggatagccgtgatagccgaggcaggcagaaaccgcgtgttgttcattaacaatgtaatcattacagatgcgatccagctcgccggtgctgacgcccggtttaacatacggttcgatcatctccagcacttcggcagccagtcggccagcgacgcgcattttttcgatatcttctggggtcttgatagagatagccattaattctgtccatcagcgtcggtgataccgacaatatatatgtaagtgccgtcaatggtatcacacccgggcaaattgagaatcattctgaatttcgccaaacgtgccactgaaggttttctataatagaaaattcgacgtctgatgctgtacacagcgccaacaattattggtgtccacgacgtatttgtggtataaagcgcgccggacttccgatccatttcgtatacacagactggacggaagcgacaatctcactttgtgtaacaacacacacgtatcggcacatattccggggtgccctttggggtcggtaatatgggatacgtggaggcataaccccaacttttatatagaggttttaatcatggcaactgtttccatgcgcgacatgctcaaggctggtgttcacttcggtcaccagacccgttactggaacccgaaaatgaagccgttcatcttcggtgcgcgtaacaaagttcacatcatcaaccttgagaaaactgtaccgatgttcaacgaagctctggctgaactgaacaagattgcttctcgcaaaggtaaaatccttttcgttggtactaaacgcgctgcaagcgaagcggtgaaagacgctgctctgagctgcgaccagttcttcgtgaaccatcgctggctgggcggtatgctgactaactggaaaaccgttcgtcagtccatcaaacgtctgaaagacctggaaactcagtctcaggacggtactttcgacaagctgaccaagaaagaagcgctgatgcgcactcgtgagctggagaaactggaaaacagcctgggcggtatcaaagacatgggcggtctgccggacgctctgtttgtaatcgatgctgaccacgaacacattgctatcaaagaagcaaacaacctgggtattccggtatttgctatcgttgataccaactctgatccggacggtgttgacttcgttatcccgggtaacgacgacgcaatccgtgctgtgaccctgtacctgggcgctgttgctgcaaccgtacgtgaaggccgttctcaggatctggcttcccaggcggaagaaagcttcgtagaagctgagtaataaggcttgataactcccccaaaatagttcgagttgcagaaaggcggcaagctcgagaattcccgggagcttacatcagtaagtgaccgggatgagcgagcgaagataacgcatctgcggcgcgaaatatgaagggggagagcccttatagaccaggtagtacacgtttggttagggggcctgcatatggccccctttttcacttttatatctgtgcggtttaatgccgggcagatcacatctccgaggattttagaatggctgaaattaccgcatccctggtaaaagagctgcgtgagcgtactggcgcaggcatgatggattgcaaaaaagcactgactgaagctaacggcgacatcgagctggcaatcgaaaacatgcgtaagtccggtgctattaaagcagcgaaaaaagcaggcaacgttgctgctgacggcgtgatcaaaaccaaaatcgacggcaactacggcatcattctggaagttaactgccagactgacttcgttgcaaaagacgctggtttccaggcgttcgcagacaaagttctggacgcagctgttgctggcaaaatcactgacgttgaagttctgaaagcacagttcgaagaagaacgtgttgcgctggtagcgaaaattggtgaaaacatcaacattcgccgcgttgctgcgctggaaggcgacgttctgggttcttatcagcacggtgcgcgtatcggcgttctggttgctgctaaaggcgctgacgaagagctggttaaacacatcgctatgcacgttgctgcaagcaagccagaattcatcaaaccggaagacgtatccgctgaagtggtagaaaaagaataccaggtacagctggatatcgcgatgcagtctggtaagccgaaagaaatcgcagagaaaatggttgaaggccgcatgaagaaattcaccggcgaagtttctctgaccggtcagccgttcgttatggaaccaagcaaaactgttggtcagctgctgaaagagcataacgctgaagtgactggcttcatccgcttcgaagtgggtgaaggcatcgagaaagttgagactgactttgcagcagaagttgctgcgatgtccaagcagtcttaattatcaaaaaggagccgcctgagggcggcttctttttgtgcccatcttgtaaattcagctaacccttgtggggctgcgctgaaaagcgacgtacaatgtcgctagtattaattcatttcaatcgttgacagtctcaggaaagaaacatggctaccaatgcaaaacccgtctataaacgcattctgcttaagttgagtggcgaagctctgcagggcactgaaggcttcggtattgatgcaagcatactggatcgtatggctcaggaaatcaaagaactggttgaactgggtattcaggttggtgtggtgattggtgggggtaacctgttccgtggcgctggtctggcgaaagcgggtatgaaccgcgttgtgggcgaccacatggggatgctggcgaccgtaatgaacggcctggcaatgcgtgatgcactgcaccgcgcctatgtgaacgctcgtctgatgtccgctattccattgaatggcgtgtgcgacagctacagctgggcagaagctatcagcctgttgcgcaacaaccgtgtggtgatcctctccgccggtacaggtaacccgttctttaccaccgacagtgcagcttgcctgcgtggtatcgaaattgaagccgatgtggtgctgaaagcaaccaaagttgacggcgtgtttaccgctgatccggcgaaagatccaaccgcaaccatgtacgagcaactgacttacagcgaagtgctggaaaaagagctgaaagtcatggacctggcggccttcacgctggctcgtgaccataaattaccgattcgtgttttcaatatgaacaaaccgggtgcgctgcgccgtgtggtaatgggtgaaaaagaagggactttaatcacggaataattcccgtgatggataaataagggtaagattccgcgtaagtatcgcgggggcgtaagtctggttataaggcgttattgttgcaggcagtttggtcacggccagcgcgcagcaaccggagcgtacaaaagtacgtgaggatggcgagcactgcccggggccaaaatggcaaataaaatagcctaataatccagacgattacccgtaatatgtttaatcagggctatacttagcacacttccactgtgtgtgactgtctggtctgactgagacaagttttcaaggattcgtaacgtgattagcgatatcagaaaagatgctgaagtacgcatggacaaatgcgtagaagcgttcaaaacccaaatcagcaaaatacgcacgggtcgtgcttctcccagcctgctggatggcattgtcgtggaatattacggcacgccgacgccgctgcgtcagctggcaagcgtaacggtagaagattcccgtacactgaaaatcaacgtgtttgatcgtagtatgtctccggccgttgaaaaagcgattatggcgtccgatcttggcctgaacccgaactctgcgggtagcgacatccgtgttccgctgccgccgctgacggaagaacgtcgtaaagatctgaccaaaatcgttcgtggtgaagcagaacaagcgcgtgttgcagtacgtaacgtgcgtcgtgacgcgaacgacaaagtgaaagcactgttgaaagataaagagatcagcgaagacgacgatcgccgttctcaggacgatgtacagaaactgactgatgctgcaatcaagaaaattgaagcggcgctggcagacaaagaagcagaactgatgcagttctgatttcttgaacgacaaaaacgccgctcagtagatccttgcggatcggctggcggcgttttgctttttattctgtctcaactctggatgtttcatgaagcaactcaccattctgggcagcaccggcagcattggttgcagcacgctggacgtggtgcgccataatcccgaacacttccgcgtagttgcgctggtggcaggcaaaaatgtcactcgcatggtagaacagtgcctggaattctctccccgctatgccgtaatggacgatgaagcgagtgcgaaacttcttaaaacgatgctacagcaacagggtagccgcaccgaagtcttaagtgggcaacaagccgcttgcgatatggcagcgcttgaggatgttgatcaggtgatggcagccattgttggcgctgctgggctgttacctacgcttgctgcgatccgcgcgggtaaaaccattttgctggccaataaagaaagtctggttacctgcggacgtctgtttatggacgccgtaaagcagagcaaagcgcaattgttaccggtcgatagcgaacataacgccatttttcagagtttaccgcaacctatccagcataatctgggatacgctgaccttgagcaaaatggcgtggtgtccattttacttaccgggtctggtggccctttccgtgagacgccattgcgcgatttggcaacaatgacgccggatcaagcctgccgtcatccgaactggagcatggggcgtaaaatttctgtcgatagcgctaccatgatgaacaaaggtctggaatacattgaagcgcgttggctgtttaacgccagcgccagccagatggaagtgctgattcacccgcagagtgtgattcacagtatggtgcgctatcaggacggcagtgttctggcgcagctgggggaaccggatatgcgtacgccaattgcccacaccatggcatggccgaatcgcgtgaactctggcgtgaagccgctcgatttttgcaaactaagtgcgttgacatttgccgcaccggattatgatcgttatccatgcctgaaactggcgatggaggcgttcgaacaaggccaggcagcgacgacagcattgaatgccgcaaacgaaatcaccgttgctgcttttcttgcgcaacaaatccgctttacggatatcgctgcgttgaatttatccgtactggaaaaaatggatatgcgcgaaccacaatgtgtggacgatgtgttatctgttgatgcgaacgcgcgtgaagtcgccagaaaagaggtgatgcgtctcgcaagctgaggataatccggctacagagagtcgcgctatttgttagcgtagggcttcagtgatatagtctgcgccatctgatcgtaagtagttggctttataaggtcagatatgccgtggttttacacggcttttttttgtataggcttcagtattcctgagtaccgtaaaccctgtcagggaataaaaaacgcgtgatgttgtctgctactcaaccacttagcgaaaaattgccagcgcatggctgccgtcatgttgcgatcattatggacggcaatggccgctgggcaaaaaagcaagggaagattcgtgcctttgggcataaagccggggcaaaatccgtccgccgggctgtctcttttgcggccaacaacggtattgaggcgttaacgctgtatgcctttagtagtgaaaactggaaccgaccagcgcaggaagtcagtgcgttaatggaactgtttgtgtgggcgctcgatagcgaagtaaaaagtctgcaccgacataacgtgcgtctgcgtattattggcgataccagtcgctttaacagccgtttgcaagaacgtattcgtaaatctgaagcgctaacagccgggaataccggtctgacgctgaatattgcggcgaactacggtggacgttgggatatagtccagggagtcaggcaactggctgaaaaggtgcagcaaggaaacctgcaaccagatcagatagatgaagagatgctaaaccagcatgtctgtatgcatgaactggcccctgtagatttagtaattaggactgggggggagcatcgcattagtaactttttgctttggcaaattgcctatgccgaactttactttacagatgttctctggcccgatttcgatgaacaagactttgaaggggcgttaaatgcctttgctaatcgagagcgtcgtttcggcggcaccgagcccggtgatgaaacagcctgatgggggtcgcttttgctgaagtatcgcctgatatctgcttttgtgttaatacccgtcgtcatcgcggcgttgtttctgttgccgccggtggggttcgccattgtaacgctggtggtctgcatgctggcagcgtgggaatggggacagcttagcggttttaccactcgtagccagcgagtatggttggcggtgttatgcgggttattgttggcgctgatgctttttctgttgccggaatatcaccgaaatattcatcaaccgctggttgaaatcagtctttgggctagcctgggttggtggattgtcgcgctattgctggtgctgttttacccaggttccgcagcaatctggcgtaactctaaaacattgcgccttatttttggcgtgctaaccattgttcccttcttctggggcatgctggcgttacgggcctggcactatgacgagaatcattacagtggcgcaatatggctgctctatgtcatgatcctggtatggggcgctgactccggcgcatatatgtttggcaaattgtttggtaaacataagctggcaccgaaggtttctccgggtaaaacctggcaaggctttatcggtggactcgctactgcagcggtaatcagttggggttatggcatgtgggcgaatctcgacgtcgctcccgtcaccttactcatttgctctattgtcgcagcgttagccagtgtgctcggcgatctgaccgagagtatgtttaagcgtgaagcaggaattaaggacagcggtcatttaattccaggacacggtggtattttagatcgtattgatagcctgacggctgcggtaccggtctttgcttgcttgttgttactggtattcaggacgctttaacggaaggtaatatgctgagttttctctgggatttggctagcttcatcgttgcactgggtgtacttatcaccgtgcatgaatttggtcatttctgggttgcccggcgttgtggtgttcgcgttgagcgtttcagtatagggtttggtaaggcgctctggcggcgaactgataagctcggcaccgaatatgttatcgccctgatcccgttgggcggttatgtcaaaatgctggatgagcgcgcagaaccggtcgttccggaactccgccaccatgccttcaataataaatctgtcggccaacgagcggcgattattgccgcaggtccggttgcaaacttcatttttgctatctttgcctactggctggtttttattattggtgtgcctggcgtacgtccggtggttggcgaaatagcagccaatagcatagctgcggaagcacaaattgcaccaggtacggaactaaaagccgtagatggtatcgaaacgcctgattgggatgccgtgcgtttgcagttggtcgataaaattggcgatgaaagcaccaccattacagtagcgccatttggcagcgaccaacggcgggatgtaaagctcgatttacgtcactgggcgtttgagcctgataaagaagatccggtatctagcctggggattcgtcctcgtgggccgcaaattgaacctgtactggaaaatgtgcagccaaacagcgcggcaagcaaggcaggtttgcaagcaggcgacaggatcgttaaagtcgatggtcagcccttaacgcagtgggtgacctttgtgatgcttgtccgggataacccgggtaaatccttagcgttagaaatcgaaaggcaggggagtcccttgtctttgacattaatcccggagagtaaaccgggtaatggtaaagcgattggttttgtcggtattgagccgaaagtcattcctttgccagatgagtataaagttgtacgccagtatgggccgttcaacgccatcgtcgaagccacggacaaaacgtggcagctgatgaagctgacggtcagtatgctgggaaaattgatcaccggtgatgtgaaactgaacaacctcagtgggccgatctctatcgccaagggggctgggatgacagcggaactcggggttgtttattacctgccgtttcttgcgcttattagcgtgaacttagggataattaacctgtttccgttgcccgtacttgacggggggcatctgctgttccttgcgatcgaaaagatcaagggcggaccggtatccgagcgggttcaagacttttgttatcgcattggcagcattctgctggtgctgttaatggggcttgcacttttcaatgatttctctcggttatgagagttagttaggaagaacgcataataacgatggcgatgaaaaagttgctcatagcgagcctgctgtttagcagcgccaccgtatacggtgctgaagggttcgtagtgaaagatattcatttcgaaggccttcagcgtgtcgccgttggtgcggccctcctcagtatgccggtgcgcacaggcgacacggttaatgatgaagatatcagtaataccattcgcgctctgtttgctaccggcaactttgaggatgttcgcgtccttcgtgatggtgatacccttctggttcaggtaaaagaacgtccgaccattgccagcattactttctccggtaacaaaagcgtgaaagatgacatgctgaagcaaaacctcgaggcttctggtgtgcgtgtgggcgaatccctcgatcgcaccaccattgccgatatcgagaaaggtctggaagacttctactacagcgtcggtaaatatagcgccagcgtaaaagctgtcgtgaccccgctgccgcgcaaccgtgttgacctaaaactggtgttccaggaaggtgtgagtgctgaaatccagcaaattaacattgttggtaaccatgctttcaccaccgacgaactgatctctcatttccaactgcgtgacgaagtgccgtggtggaacgtggtaggcgatcgtaaataccagaaacagaaactggcgggcgaccttgaaaccctgcgcagctactatctggatcgcggttatgcccgtttcaacatcgactctacccaggtcagtctgacgccagataaaaaaggtatttacgtcacggtgaacatcaccgaaggcgatcagtacaagctttctggcgttgaagtgagcggcaaccttgccgggcactccgctgaaattgagcagctgactaagatcgagccgggtgagctgtataacggcaccaaagtgaccaagatggaagatgacatcaaaaagcttctcggtcgctatggttatgcctatccgcgcgtacagagcatgcccgaaattaacgatgccgacaaaaccgttaaattacgtgtgaacgttgatgcgggtaaccgtttctacgtgcgtaagatccgttttgaaggtaacgataccagcaaagatgccgtcctgcgtcgcgaaatgcgtcagatggaaggtgcatggctggggagcgatctggtcgatcagggtaaggagcgtctgaatcgtctgggcttctttgaaactgtcgataccgatacccaacgtgttccgggtagcccggaccaggttgatgtcgtctacaaggtaaaagagcgcaacaccggtagcttcaactttggtattggttacggtactgaaagtggcgtgagcttccaggctggtgtgcagcaggataactggttaggtacaggttatgctgttggtatcaacgggaccaaaaacgattaccagacctatgctgaactgagcgtaaccaacccgtacttcaccgtagatggcgtaagcctcggtggtcgtctcttctataatgacttccaggcagatgacgccgacctgtccgactataccaacaagagttatggtacagacgtgacgttgggcttcccgattaacgaatataacagcctgcgtgcaggtctgggttatgtacataactccctgtccaacatgcagcctcaggttgcgatgtggcgttatctgtactctatgggtgaacatccgagcacctctgatcaggataacagcttcaaaacggacgacttcacgttcaactatggttggacctataacaagcttgaccgtggttacttcccgacagatggtagtcgtgtcaacctgaccggtaaagtgaccattcctggaagcgataacgaatactacaaagtgacgttagacacggcgacttatgtgccgatcgatgacgatcacaaatgggttgttctggggcgtacccgctggggttatggtgatggtttaggcggcaaagagatgccgttctacgagaacttctatgccggtggttccagcaccgtgcgtggcttccagtccaataccattggtccgaaagcagtttacttcccgcatcaggccagtaattatgatccggactatgattacgaatgtgcgactcaggacggcgcgaaagacctgtgtaaaagcgatgatgctgtaggcggtaacgccatggcggttgccagcctcgagttcatcaccccgacgccgtttattagcgataagtatgctaacagcgttcgtacttccttcttctgggatatgggtaccgtttgggatacaaactgggattccagccaatattctggatatccggactatagtgatccaagcaatatccgtatgtctgcgggtatcgcattacaatggatgtccccattggggccgttggtgttctcctacgcccagccgttcaaaaagtacgatggagacaaggcagaacagttccagtttaacatcggtaaaacctggtaagtgttctccacaaaggaatgtagtggtagtgtagcgatgactttaggcgatcaatataagatcgccgggccacgcaaagaactgcaccctccggtgcaaatgggatggtaaggagtttattgtgaaaaagtggttattagctgcaggtctcggtttagcactggcaacttctgctcaggcggctgacaaaattgcaatcgtcaacatgggcagcctgttccagcaggtagcgcagaaaaccggtgtttctaacacgctggaaaatgagttcaaaggccgtgccagcgaactgcagcgtatggaaaccgatctgcaggctaaaatgaaaaagctgcagtccatgaaagcgggcagcgatcgcactaagctggaaaaagacgtgatggctcagcgccagacttttgctcagaaagcgcaggcttttgagcaggatcgcgcacgtcgttccaacgaagaacgcggcaaactggttactcgtatccagactgctgtgaaatccgttgccaacagccaggatatcgatctggttgttgatgcaaacgccgttgcttacaacagcagcgatgtaaaagacatcactgccgacgtactgaaacaggttaaataagtaatgcctagtattcgactggctgatttagcgcagcagttggatgcagaactacacggtgatggcgatatcgtcatcaccggcgttgcgtccatgcaatctgcacaaacaggtcacattacgttcatggttaacccaaaataccgtgagcatttaggcttgtgccaggcgtccgcggttgtcatgacccaggacgatcttcctttcgcgaaaagtgccgcactggtagtgaagaatccctacctgacttacgcgcgcatggcgcaaattttagataccacgccgcagcccgcgcagaacattgcacccagtgcggtgatcgacgcgacggcgaagctgggtaacaacgtaagcattggcgctaacgcggtgattgagtccggcgttgaactgggcgataacgtgattatcggtgccggttgcttcgtaggtaaaaacagcaaaatcggtgcaggtagccgtctctgggcgaacgtaaccatttaccatgagatccagatcggtcagaattgcctgatccagtccggaacagtggtaggcgcagacggctttggttatgccaacgatcgtggtaactgggtgaagatcccacagattggtcgcgtaattattggcgatcgcgtggagatcggtgcctgcacaaccatcgatcgcggcgcgctggatgacactattattggcaatggcgtgatcattgataaccagtgccagattgcacataacgtcgtgattggcgacaatacggcggttgccggtggcgtcattatggcgggcagcctgaaaattggtcgttactgcatgatcggcggagccagcgtaatcaacgggcatatggaaatatgcgacaaagtgacggttacgggcatgggtatggtgatgcgtcccatcactgaaccaggcgtctattccagtggcattccgctgcaacccaacaaagtctggcgcaaaaccgctgcactggtgatgaacattgatgacatgagcaagcgtctgaaaagccttgagcgcaaggttaatcaacaagactaacgttccatcttttgttcgccaaactttacggcctgtctcattcttacgattgcggcaggccgtgttattattgtcgtttcttatattttgacaggaagagtatcttgactactaacactcatactctgcagattgaagagattttagaacttctgccgcaccgtttcccgttcttactggtggatcgcgtgctggattttgaagaaggtcgttttctgcgcgcagtaaaaaatgtctctgtcaatgagccattcttccagggccatttccctggaaaaccgattttcccgggtgtgctgattctggaagcaatggcacaggcaacaggtattctggcgtttaaaagcgtaggaaaactggaaccgggtgagctgtactacttcgctggtattgacgaagcgcgcttcaagcgcccggtcgtgcctggcgatcaaatgatcatggaagtcactttcgaaaaaacgcgccgcggcctgacccgttttaaaggggttgctctggtcgatggtaaagtagtttgcgaagcaacgatgatgtgtgctcgtagccgggaggcctgatacgtgattgataaatccgcctttgtgcatccaaccgccattgtggaagagggcgcgagtattggcgcgaacgcacacattggtcctttttgtatcgttggaccccatgtcgaaattggtgagggtaccgtactgaaatctcacgttgtcgtgaatggtcatactaaaattggccgcgataatgagatttatcagttcgcctccatcggcgaagttaaccaggatctgaaatatgctggcgaaccgacccgtgtggaaatcggcgatcgtaaccgcattcgcgaaagcgtcaccattcatcgtggcacagtccagggcggtggattgacgaaggtgggcagcgacaacttactgatgatcaacgcgcacattgcgcacgattgtacggtaggtaaccgctgtattctcgccaacaacgcaacgctggcgggtcacgtaagcgttgacgacttcgcgatcatcggcggcatgaccgcagtccatcagttctgcatcattggtgcgcacgtgatggttggcggctgctccggtgtggcgcaggacgtccctccttatgtcattgcgcagggtaaccacgcaacgccgttcggtgtcaatatcgaagggctgaagcgccgcggattcagccgtgaggcgattaccgctatccgcaatgcgtataagctgatttatcgtagcggtaaaacgctcgatgaagtgaaaccggaaattgctgaactggcggaaacatatccggaagtgaaagcctttaccgatttctttgcacgcagtacgcgcggtctgattcgttaatgactgaacagcgtccattaacgattgccctggtcgccggagaaacctccggcgatatcctgggggccggtttaatccgcgctctgaaagaacatgtgcccaacgcccgctttgttggtgttgccgggccacgaatgcaggctgaaggctgcgaagcctggtacgaaatggaagaactggcggtgatgggcattgttgaagtgctcggtcgtctgcgtcgcttactgcatattcgtgccgatctgacaaagcgttttggcgaactgaagccagatgtttttgttggtattgatgcgcctgacttcaatattactcttgaaggtaacctcaaaaagcagggtatcaaaaccattcattacgtcagtccgagtgtctgggcgtggcgacagaaacgtgttttcaaaataggcagagccaccgatctggtgctcgcatttctgcctttcgaaaaagcgttttatgacaaatacaacgtaccgtgccgctttatcggtcataccatggctgatgccatgccattagatccagataaaaatgccgcccgtgatgtgctggggatccctcacgatgcccactgcctggcgttgctaccggggagccgtggtgcagaagttgaaatgcttagtgccgatttcctgaaaacggcccagcttttgcgccagacatatccggatctcgaaatcgtggtgccactggtgaatgccaaacgccgcgagcagtttgaacgcatcaaagctgaagtcgcgccagaccttagtgttcatttgctggatgggatgggccgtgaggcgatggtcgccagcgatgcggcgctactggcgagcggtacggcagccctggagtgtatgctggcgaaatgcccgatggtggtgggatatcgcatgaagccttttaccttctggttggcgaagcggctggtgaaaactgattatgtcagcctgccaaatctgctggcgggcagagagttagtcaaagaattattgcaggaagagtgtgagccgcaaaaactggctgcggcgctgttaccgctgttggcgaacgggaaaaccagccacgcgatgcacgataccttccgtgaactgcatcagcagatccgctgcaatgccgatgagcaggcggcacaagccgttctggagttagcacaatgatcgaatttgtttatccgcacacgcagctggttgcgggtgtggatgaagtcggacgcgggccgttagttggcgcggtcgtcaccgctgcggtgatccttgacccggcgcgcccgattgccgggctgaatgattccaaaaagctgagcgaaaaacgccgtctggcgctctatgaagagatcaaagagaaagcgttgagctggagtctgggccgcgcggaaccccacgaaatcgacgagctgaacattcttcatgcgaccatgctggcgatgcagcgtgccgtcgctgggctgcatattgcgccggaatatgtgttgattgatggtaaccgctgcccgaaattaccgatgcctgcgatggctgtggtgaaaggcgatagccgcgtaccggaaatcagtgccgcgtctatcctggcgaaagtgacgcgtgacgccgaaatggcggcgctggatattgttttcccgcaatatggttttgcccaacacaaagggtacccaaccgcttttcatctggaaaaactggctgaacacggcgcgaccgaacaccatcggcgcagctttgggcctgtcaaacgcgcactgggacttgcgtcctgattcttgtgtcgagattaagtaaaccggaatctgaagatgtctgaaccacgtttcgtacacctgcgggtgcacagcgactacagcatgatcgatggcctggccaaaaccgcaccgttggtaaaaaaggcggcggcgttgggtatgccagcactggcgatcaccgatttcaccaacctttgtggtctggtgaagttctacggagcgggacatggcgcagggattaagcctatcgtcggggcagattttaacgtccagtgcgacctgctgggtgatgagttaacccacctgacggtactggcggcgaacaataccggctatcagaatctgacgttgctgatcagtaaagcgtatcagcgcgggtacggtgccgccgggccgatcatcgatcgcgactggcttatcgaattaaacgaagggttgatccttctttccggcggacgcatgggcgacgtcggacgcagtcttttgcgtggtaacagcgcgctggtagatgagtgtgtcgcgttttatgaagaacacttcccggatcgctattttctcgagctgatccgcaccggcaggccggatgaagaaagctatctgcacgcggcggtggaactggcggaagcgcgcggtttgcccgtcgtggcgaccaacgacgtgcgctttatcgacagcagcgactttgacgcacacgaaatccgcgtcgcgatccacgacggctttaccctcgacgatcctaaacgcccgcgtaactatagcccgcagcaatatatgcgtagcgaagaggagatgtgtgagctgtttgccgacatccccgaagcccttgccaacaccgttgagatcgccaaacgctgtaacgtaaccgtgcgtcttggtgaatacttcctgccgcagttcccgaccggggacatgagcaccgaagattatctggtcaagcgtgcaaaagagggcctggaagagcgtctggcctttttattccctgatgaggaagaacgtcttaagcgccgcccggaatatgacgaacgtctggagactgaacttcaggttatcaaccagatgggcttcccgggctacttcctcatcgttatggaatttatccagtggagcaaagataacggcgtaccggtagggccaggccgtggctccggtgcgggtagtctggtggcctacgcgctgaaaatcaccgacctcgatccgctggaatttgacctgctgttcgaacgtttccttaacccggaacgtgtctccatgcctgacttcgacgttgacttctgtatggagaaacgcgatcaggttatcgagcacgtagcggacatgtacggtcgtgatgcggtaagccagatcatcaccttcggtacaatggcggcgaaagcggtgatccgcgacgtaggccgcgtgctggggcatccgtacggctttgtcgatcgtatcagcaaactgatcccgcccgatccggggatgacgctggcgaaagcgtttgaagccgagccgcagctgccggaaatctacgaagcggatgaagaagttaaggcgctgatcgacatggcgcgcaaactggaaggggtcacccgtaacgccggtaagcacgccggtggggtggttatcgcgccgaccaaaattaccgattttgcgccgctttactgcgatgaagagggcaaacatccggtcacccagtttgataaaagcgacgttgaatacgccggactggtgaagttcgacttccttggtttgcgtacgctcaccatcatcaactgggcgctggagatgatcaacaagcggcgggcgaagaatggcgagccgccgctggatatcgctgcgatcccgctggatgataagaaaagcttcgacatgctgcaacgcagcgaaaccacggcggtattccagcttgaaagccgcggcatgaaggacctgatcaagcgtctacaacctgactgcttcgaagatatgatcgccctagtggcactgttccgccccggtccgttgcaaagtgggatggtggataactttatcgaccgtaaacatggtcgtgaagagatctcctatccggacgtacagtggcagcatgaaagcctgaaaccggtactggagccaacctacggcattatcctgtatcaggaacaggtcatgcagattgcgcaggtgctttctggttataccctcggtggcgcggatatgctgcgtcgtgcgatgggtaagaaaaagccggaagagatggctaagcaacgttctgtatttgctgaaggtgcagaaaagaacggaatcaacgctgaactggcgatgaaaatcttcgacctggtggagaaattcgctggttacggatttaacaaaagccactctgcggcctatgctttggtgagttatcaaacgttatggctgaaagcgcactatcctgcggagtttatggcggcggtaatgaccgccgatatggacaacaccgagaaggtggtgggtctggtggatgagtgctggcggatggggctgaaaatcctgccaccagatataaactccggtctttaccatttccacgtcaacgacgacggcgaaatcgtgtatggtattggcgcgatcaaaggggtcggtgaaggtccgattgaggccatcatcgaagcccgtaataaaggcggctacttccgcgaactgtttgatctctgcgcccgtaccgacaccaaaaagttgaaccgtcgcgtgctggaaaaactgatcatgtccggggcgtttgaccgtcttgggccacatcgcgcagcgctgatgaacagcctgggcgatgcgttaaaagcggcagatcaacacgcgaaagcggaagctatcggtcaggccgatatgttcggcgtgctggccgaagagccggaacaaattgaacaatcctacgccagctgccaaccgtggccggagcaggtggtattagatggggaacgtgaaacgttaggcctgtacctgaccggacaccctatcaaccagtatttaaaagagattgagcgttatgtcggaggcgtaaggctgaaagacatgcacccgacagaacgtggtaaagtcatcacggctgcggggctcgttgttgccgcgcgggttatggtcaccaagcgcggcaatcgtatcggtatctgcacgctggatgaccgttccgggcggctggaagtgatgttgtttactgacgccctggataaataccagcaattgctggaaaaagaccgcatacttatcgtcagcggacaggtcagctttgatgacttcagcggtgggcttaaaatgaccgctcgcgaagtgatggatattgacgaagcccgggaaaaatatgctcgcgggcttgctatcagcctgacggacaggcaaattgatgaccagcttttaaaccgactccgtcagtctctggaaccccaccgctctgggacaattccagtacatctctactatcagagggcggatgcacgcgcgcggttgcgttttggcgcgacgtggcgtgtctctccgagcgatcgtttattaaacgatctccgtggcctcattggtagcgagcaggtggaactggagtttgactaatacaggaatactatgagtctgaatttccttgattttgaacagccgattgcagagctggaagcgaaaatcgattctctgactgcggttagccgtcaggatgagaaactggatattaacatcgatgaagaagtgcatcgtctgcgtgaaaaaagcgtagaactgacacgtaaaatcttcgccgatctcggtgcatggcagattgcgcaactggcacgccatccacagcgtccttataccctggattacgttcgcctggcatttgatgaatttgacgaactggctggcgaccgcgcgtatgcagacgataaagctatcgtcggtggtatcgcccgtctcgatggtcgtccggtgatgatcattggtcatcaaaaaggtcgtgaaaccaaagaaaaaattcgccgtaactttggtatgccagcgccagaaggttaccgcaaagcactgcgtctgatgcaaatggctgaacgctttaagatgcctatcatcacctttatcgacaccccgggggcttatcctggcgtgggcgcagaagagcgtggtcagtctgaagccattgcacgcaacctgcgtgaaatgtctcgcctcggcgtaccggtagtttgtacggttatcggtgaaggtggttctggcggtgcgctggcgattggcgtgggcgataaagtgaatatgctgcaatacagcacctattccgttatcagcccggaaggttgtgcgtccattctgtggaagagcgccgacaaagcgccgctggcggctgaagcgatgggtatcattgctccgcgtctgaaagaactgaaactgatcgactccatcatcccggaaccactgggtggtgctcaccgtaacccggaagcgatggcggcaagcttgaaagcgcaactgctggcggatctggccgatctcgacgtgttaagcactgaagatttaaaaaatcgtcgttatcagcgcctgatgagctacggttacgcgtaattcgcaaaagttctgaaaaagggtcacttcggtggcccttttttatcgccacggtttgagcaggctatgattaaggaaggattttccaggaggaacacatgaacatcattgccattatgggaccgcatggcgtcttttataaagatgagcccatcaaagaactggagagcgcgctggtggcgcaaggctttcagattatctggccacaaaacagcgttgatttgctgaaatttatcgagcataaccctcgaatttgcggcgtgatttttgactgggatgagtacagtctcgatttatgtagcgatatcaatcagcttaatgaatatctcccgctttatgccttcatcaacacccacagcacgatggatgtcagcgtgcaggatatgcggatggcgctctggttttttgaatatgcgctggggcaggcggaagatatcgccattcgtatgcgtcagtacaccgacgaatatcttgataacattacaccgccgttcacgaaagccttgtttacctacgtcaaagagcggaagtacaccttttgtacgccggggcatatgggcggcaccgcatatcaaaaaagcccggttggctgtctgttttatgattttttcggcgggaatactcttaaggctgatgtctctattagcgtcaccgagcttggtagcttgctcgaccacaccgggccacacctggaagcggaagagtacatcgcgcggacttttggcgcggaacagagttatatcgttaccaacggaacaagcacgagcaacaaaattgtgggtatgtacgccgcgccatccggcagtacgctgttgatcgaccgcaattgtcataaaagcctggcgcatctgttgatgatgaacgatgtagtgccagtctggctgaaaccgacgcgtaatgcgttggggattcttggtgggatcccgcgccgtgaatttactcgcgacagcatcgaagagaaagtcgctgctaccacgcaagcacaatggccggttcatgcggtgatcaccaactccacctatgatggcttgctctacaacaccgactggatcaaacagacgctggatgtcccgagcattcacttcgattctgcctgggtgccgtacacccattttcatccgatctaccagggtaaaagtggtatgagcggcgagcgtgttgcgggaaaagtgatcttcgaaacgcaaagcacccacaaaatgctggcggcgttaagccaggctagcctgatccacattaaaggcgagtatgacgaagaggcctttaacgaagcctttatgatgcataccaccaccagccccagttatcccattgttgctagcgttgagacggcggcggcgatgctgcgtggtaatccgggcaaacggctgattaaccgtagtgtagaacgagctctgcattttcgcaaagaggtccagcggctgcgggaagagtctgacggttggtttttcgatatctggcaaccgccgcaggtggatgaagccgaatgctggcccgttgcgcctggcgaacagtggcacggctttaacgatgcggatgccgatcatatgtttctcgatccggttaaagtcactattttgacaccggggatggacgagcagggcaatatgagcgaggaggggatcccggcggcgctggtagcaaaattcctcgacgaacgtgggatcgtagtagagaaaaccggcccttataacctgctgtttctctttagtattggcatcgataaaaccaaagcaatgggattattgcgtgggttgacggaattcaaacgctcttacgatctcaacctgcggatcaaaaatatgctacccgatctctatgcagaagatcccgatttctaccgcaatatgcgtattcaggatctggcacaagggatccataagctgattcgtaaacacgatcttcccggtttgatgttgcgggcattcgatactttgccggagatgatcatgacgccacatcaggcatggcaacgacaaattaaaggcgaagtagaaaccattgcgctggaacaactggtcggtagagtaagcgcaaatatgatcctgccttatccaccgggcgtaccgctgttgatgcctggagaaatgctgaccaaagagagccgcacagtactcgattttctactgatgctttgttccgtcgggcaacattaccccggttttgaaacggatattcacggcgcgaaacaggacgaagacggcgtttaccgcgtacgagtcctaaaaatggcgggataacttgccagagcggcttccgggcgagtaacgtgctgttaacaaataaaggagacgttatgctgggtttaaaacaggttcaccatattgcgattattgcgacggattatgcggtgagcaaagctttctactgcgatattcttggtttcacgctgcaaagcgaagtctatcgcgaagcgcgcgacagttggaaaggggatttggcgcttaatgggcaatatgtgattgagcttttcagttttccgttcccgccggaacgacccagccgaccggaagcttgcggtctgcgtcatctggcttttagcgttgatgacatcgatgcggcagtggcgcaccttgaaagccataacgtgaagtgtgaaaccatccgtgtcgatccatacacgcaaaaacgcttcaccttctttaacgatccggacgggctgccgttggaactgtatgagcagtaaggcttgtcatcgccgcatttgcccggtaacgtgccgggcattgctactgtaaaatcgcaccatcatgacactcacgctcaatagacaacttctcaccagtcgccagattctggtggcctttagcggcgggcttgactccaccgttctgctgcatcagttggtgcagtggcggacggaaaatccgggtgtcgctctgcgcgctattcatgtgcatcacggtttaagtgccaatgccgatgcctgggttacgcattgcgaaaacgtctgccaacagtggcaggtgccgctggtggtcgaacgcgtacaacttgcgcaagaaggactgggcattgaggcccaggcgcggcaggcacgttatcaggcatttgcccgcaccttgttgcccggtgaagtgctggtcaccgcgcaacatctcgacgatcaatgtgaaacctttctgctggcgctaaaacgcggcagtggccctgccgggcttagcgctatggcggaagtcagcgagtttgccggaacgcggcttattcgcccgttgctcgcccgcacgcggggggaactggtgcagtgggcgcgtcagtatgatttacgctggattgaagacgaaagtaatcaggacgacagttacgatcgtaactttctgcgcctgcgcgtagtgccgttattgcagcagcgttggccgcattttgccgaagcaacggcccgcagcgccgcactttgtgctgaacaagagagcctgctggatgaactgctggcagatgatttagcacactgtcaaagcccgcaggggacgctgcagattgtgccaatgctggcgatgagtgatgcccgccgcgcggcgattatccgccgctggctggcagggcagaatgcaccgatgccttcccgcgacgcgttggtgaggatctggcaggaagtggcgctggcgcgggaagatgccagtccctgtttacgtttgggcgcgtttgaaatccgacgctatcagagccaactgtggtggattaaatccgtcaccgggcaaagcgaaaacattgtgccgtggcagacgtggcttcaaccgctggaattaccggcggggctgggaagtgtacagcttaatgcgggaggcgatattcgccctccgcgtgcagacgaagcggtcagcgtgcgtttcaaagcgccaggattgctgcatattgtcgggcgtaacggcggacgtaagctaaagaaaatctggcaagagctgggcgtgccgccgtggctacgtgacaccacgccactgctgttttatggcgaaacgctgattgcggcggcaggggtatttgtgacgcaagaaggtgtggctgaaggtgagaatggcgtaagttttgtctggcagaaaacgcttagttaagtgaaagccggataagacgcatcaaacgtcgcatccggcgaaagtcaatcaggattcgcttaccaccaccgtaccgatttccgggtggctaaagctggtaattttatccagacgcagctcgcgggtttcgccagcggcctcgacgaccaggtactccacatttttgcgggagactaaatcactggcttttgcctgcaatttttcgccatctttcagctcaagtgtcagcattaaatgatgctggcaggcgagctcaagattatcgtaatcatcacaattgattggttgatacgtatcattcattgacataatcgctcaccagtaagtttgccgcagcgtatgctgctttttccctgacagcctcagaaagggcgtcgtcggcagccatttcattcagcactttcaaaacgcagcccagcgcgtccggaacgtatcctaagtctccgctggcgatttccgcgtaccgcttgcgtattaactcacaatatttttccacatgccctcctgtcagcactctgacttaaccgtggatgcaagtctaagcctacgaagataaactctgtttcgcaaggtgactataccacactcatttctgcaatatcagcgccgcaactgcacgtattccgttacaatggcctcctgattcgaaaggagttttcttatggcgcttaaagcgacaatttataaagcgacggttaatgtggccgatctcgaccgcaaccagtttctcgatgcctctctgacgctggcgcgccatcctagtgaaacccaggagcgtatgatgctgcgcttgctggcgtggctgaaatatgctgatgaacgtctgcaatttacccgtggtttgtgtgccgatgatgagccggaagcgtggctgcgtaacgatcacctgggcattgatttgtggattgagctggggctgccggatgagcggcggattaagaaagcctgcacccaggccgcagaagtggcgctgtttacctataatagtcgggcggcgcaaatctggtggcagcaaaatcagagcaaatgtgtgcagtttgccaatctttccgtctggtatctggacgatgaacaactggcgaaagtaagcgcctttgccgatcgtaccatgacgctgcaggcaacgattcaggatggcgtgatctggttaagcgatgataagaataatctggaagtgaacttaaccgcctggcaacaacctagttgaactaaaccgcctggcaacaaccttcatgattgtgatttcccgacatgttgctattcccgatggtgagcttgagatcaccgccattcgtgcgcagggcgcgggcgggcagcatgttaataagaccagtacggctattcatctgcgttttgacattcgggcgtccagcctgccagagtattacaaagagcgtctgctcgccgccagccatcatttgatcagcagtgatggcgtgattgtcattaaggcacaggaataccgcagtcaggaactgaaccgcgaagcagctctggcccggctggtggctatgattaaagaattaacaacagaaaaaaaagcccgacgacccacgcggcccacccgtgcaagcaaagagcgcaggctggcaagcaaagcacaaaaaagtagcgtgaaggcgatgcgcggcaaagtgcgcagcggtcgggaataaaaagaaggaatggatggtgaaaaaagcgatagtgacagcgatggctgtaatcagcctctttactctgatgggatgtaataatcgggccgaagtcgatacgctttctccggcgcaggctgccgaactgaaaccgatgccgcaaagttggcgcggcgtgctgccgtgtgccgattgcgaaggaatcgaaacctctctgttcctcgaaaaagacggaacatgggtgatgaatgagcgttatctcggtgctcgtgaagaaccttcctccttcgcttcctacggtacatgggcgcgaaccgctgacaagctggtattaaccgacagcaaaggtgaaaagagttattatcgggcgaaaggcgatgcgctggagatgctcgatcgtgaaggcaatccgattgaaagccagttcaactatacgctggaagcggcacaatccagtttacctatgacgccgatgaccctgcggggcatgtatttttatatggctgatgcggcgaccttcactgattgcgcgaccggaaaacgtttcatggtagcgaataacgcagagctggagcgtagctacctggctgcgcgcggtcacagtgaaaaaccggtgttactgagtgtagaaggtcactttacgcttgagggtaatccggataccggtgcgccgactaaagtattggcacccgatacggcagggaaattttaccccaaccaggattgcagtagtttggggcagtaacccgtcttgagacagaaacaaacgcaaaacaggccagaaggatatatttcaacattttgaatttgcacgttttttgtaggccggataaggcgtttacgccgcatccggcaatggtgctcaacgcctgatgcgacgctggcgcgtcttatcatgcctacaacccccctcataccttaaggcggataaggcatttactttatcaccgggtcaaaccaacaaagcgacccgccttgatataaatcccaggcttcaggtgcccaacatactgtaactgcgtttctggcttaaacgcagagacatcaccaatacgcatatgcatcagatcggcagggctaatccagccgctttgcgccagtgtaagtggatgcccggctttggcaaaggcatccgtgacaaattcgctacaaaaccagctctttttgtctccttcgcccacactgcttaactgcgctttcgccaggccgctgacgcactgttggcgaaaatcctcggagaacggattcagactgcacatctggcgagtcaccataaagggaataaattcgacaatgccgcgatagttataaccgctatctttgattttattggcaaacgcggtgatatctgtggcttgttgcggggtaagatccgggactcgtaagacgaaaagcttatcactatgcttcatcgcttttttaagggaaacgatctggacgccagcgcctgtcgcttctgcaacgttattatcacccagaaagattgcaacgtgactcacagaggaagtgctgaagacgcggattccaaaactggttaccccaaggctactggagaacagcaaatcgccgggtttgagatcaggtgccgttatttcttttatactttgttcggtgaaagagctttgatgctggaatttgacagcccatgtttttgcctcggcatctactgctgtggcacttgggtctggctggctgatatcaacggtacaagcgctaagtaaaagaaagctggggagaaacaggcggcagtacgcctttggtttatccattttatacaatccatgtaaaaaaagggccctgaaattcaggaccctttctggcatcagcctttaatctgtttcaccagatattcgacgatgtcaccagtcttaattaactgtttctcgccgttgcgacgatatttatattcgatatcgtcgttgtcgaggttacggtcgcccagcacaatagtgtgcggaataccgatcagttccatatcagcaaacatcacgcccggacgctctttgcggtcatccagcagcacttcgataccttgtgcacgcagttcgctgtacagtttctcagcaagctcttgtacgcggaaggatttgtgcatgttcatcggcagaatcgccacctggaacggcgcgatagcgtcaggccatacgatgcctcgttcgtcgtagttctgctcaatcgccgcagctaccacacgcgttaccccgataccgtagcaacccatcgtcaggatttggttacggccatcttcaccctgtacggaggctttcagtgcttcggagtacttggtacccagctggaagatgtgaccaacttcgataccacgtttgatcagcagcctaccctggccatccgggcttggatcgccagccaccacgttacggatatctgcaacttccggggtagcgacatcgcgatcccagttgatgccgaagtagtgtttaccatcgatgttagcaccagcagcgaaatcactcatcgccgcaacggtacggtcaatcaccaccggaatcggcatgtttaccggacccagactacccggaccggctttaaccacggcacgaatttcttcttcggtcgcgaaagtcagcgggcttgcaacctgcggcagtttttctgctttaacttcgttcagctcgtgatcaccgcgcaccagcagcgcaacctgcgggaagctgctgccttcaaccgctttaaccagcagagtcttaaccgttttctcaatcggcagattgaactgttcaaccagttccgcgatggttttcgcgttcggcgtatcaaccagcgtcatttcctgggtagcagcagcgcgcggttctttcggcgcgatagcttctgccagttcaatgttcgctgcatagtcagaggtgtcggagaagaccacatcgtcttcaccgctctgcgccagcacctggaattcgtgagaggcgctgccgccgatagaaccggtgtcggcttgtacggcgcggaaatccagccccatgcggctgaagattttgctgtaggccgcatacattgcatcgtaggtttcctgcagggattcctgagaagtatggaaagagtaagcatctttcatcaggaattcgcgggaacgcatgacgccgaaacgcggacgcacttcgtcgcggaacttggtctggatctgatagaagttcagcggcagctgtttgtaagagctaagctcgttacgaatcaggtcagtgataacttcttcatgagttgggccgagtacgaacggacgctcgccacggtcaacaaaacgcagcagttccggaccgtactgttcccaacgaccactctcttgccacaaatcggctggctgaaccaccggcatgctcacctcgatcgcaccggcgttgttcatctcttcacgcacgatgttttcgacttttttcagaacgcgcacgccggtcggcagccaggtatataacccggaggccagcttgcggatcatcccggcgcgcagcatcagctgatggctgatcacctcggcgtcggcaggtgtctccttgagagtggagagcaggtattggctagtacgcatgttgttacggttccagttggaaggtagaacaggctcaaggcgagcctgggacaaaaaaaagtgatttagtttaccagtgcaaaagaaatgtcaaaagagaagggcgtgaatttaacgcggttccagcgcaaagacttcaaaacctgcgtcggtgacgcgccagcgaacgttaaaatcatgtagccagacggcataggttttgcccgtttcctcacctttacgataggccgggcgcgggtcctgcgccagtacttcgcggataaacagcgttaactgcggataacgcttctccagcgtcaaaagctgcttttcgacctctgcggtaaaactcaccgccatctctgcagctggcgcactttgcgcatagctggcactggcatcgggaaggctttcggcaaaggggagatacggtttgatatccactaccggcgtaccatcgaccagatccagactgccgagcttcagaatcacgctgtctttatggcaaacaacctctttcagctctaccaggctcatgccaattgggttagggcggaaagtagagcgtgttgcgaaaacccccattctggcgttaccgccgaggcgcggtggacgcacagtcggacgccagccgccttccatcgtttgatgaaagacgaaaaggatccataaatggctgaacgcttccaggccgcgaacggcgtcggcctggttgtagggagcaatgagatgcagttcgccgttggcgctttttaccagacctggctggcgcggaacggcgaacttttctttataggggctgcgaataacgcctatttgctcgaactggaaactgctcatttcgccgtaatgttaagcgcagaaccgatacatacagcctgacgatagcagcctggcgtaccgctggtgacttcgcagctatgcagtaatacagcattggctttcattttagaggcgttgatttgcatccgcttacgtgcggttggaatgctcggcggagagtcctgattagaggcctggcaagagtcgccactgacttcaccgagatcgcggaacggtttgccgactaattcttctgcattggtataaattcggaccggcgtggcgcgcggcgctttcggttttgcaggctccgctttcggctggggtgcagtgctttgaacgggttcgacaggggatctgcttaacatggaacagccgcttagcatgagtgctactaaacagatcggtaaagcacgcatagtatttcctcaatgtatgatcaaaacgtcaatattgaatcaggagcttgtaaaaatgacaagacgggcaagcgcccgtcctgaatgatattacaaattgtggaaacagcctaaaaattaccagcctttaacagctccgccgttaaacactttgtttgctgcttcgtaaacttcgtcagactgataagcctggacgaatttcttcacgttctcggcgtctttgttatcttcacgcgtcacgatcaggtttacgtacggggactctttatcttcaacaaagataccgtctttcgccggagtcaggccaatctggctggcataggtggtattgataactgccagagcgatttgcgcgtcgtccagagaacgcggcagttgcggtgcttccagttcaacaattttcagatttttggggttctcaacaacatcaagaacggtcggcagcaggccaacgccatctttcagtttgatcaagcccactttttgcagcagcagcagactacgaccaaggttagttgggtcgtttggcacggcaacctggctaccatcctgcagttcatccagacttttgattttcttggagtaaccagcaatcggataaacaaaagtgttgcctactgcgaccagtttgtagccacgatctttcagttgctgatcaaggtacggtttatgctggaaggcgttggcgtcgatatcgcctttgctcaatgcttcgtttggcagaacatagtcgttgaaggttaccagctcaacgtccaggccatatttgtctttcgcaactttctgcgcgacttctgcaacctgctgttcggcaccaacaatcacgccgactttaatgtggtttggatctttttcatcctgaccgcagcctaccagtgccagacttccgatcagggctcccactgccgcaaaggttttgaatttgaacgccataccttattccttcttcaattatttatgttgtgttgaacgttacttgcgagtgacagcccggacgatgcggtcgcctgcgaactgaattaaataaaccagaatgaccagcaataccagtaccgtattcatcaccgtcgcgttatagccgatgtagccatactgatagccaatctgacctaaaccaccggcaccgactgcaccacccatcgcggaataaccgaccagggtaatcagggtgatagttgccgcattcaccagacccggcagcgcttccggtaacagcaccttacggacgatctgcatcggcgtggcacccattgcgcgggaagcttcaattaacccggttgggatctccagcagagcgttctcgaccatacgggcaataaacggtgctgcaccaacggttaacggaacaatcgctgcctgcaaaccaatgcttgtaccgacaataacgcgggtaaacggaatcatccatacaagcaagataatgaacgggatggaacggaaaatgttcacaatcgcagaaacggtacgatacagcttcgcgttagcaataatttgccccggacgcgtgacataaagcagaacgccaaccggcagaccaatcacaaagccaaaaaaaccggatacgaaggtcattgccagcgtttcccatacgccacgaaccagcagccacatcatcggctcagacataacccagtacctctacttttacatggtgttcctgcagccaggcaatggcggcttgcgtatcttgttgtgtgccgtgcatttcagtcagcatgatgccgaacttaacgccaccggcgtaatccatctgcgcgctaataatgttgttgttgacgttgaaacgacgcgcggtttcagaaagcagtggggcatcgacgctttgaccggtaaactccagacgcagcatcggcacgcagtcagtaaatggctccgcttgcagacgttcctggtaatcttccgggatatccagatgcagggtgctctgaataaacttctgcgccagcggcgttttcggatggctgaacacttcacttaccgtgtcctgctcgatcagttctccattgctgatgaccgccacgcaatcacaaatgcgcttcacaacgtccatttcgtgggtgatcaacagaatcgtcaaccccagacggcggttgatgtctttcagcagttcgagaatagaacgtgtcgttgccgggtccagcgcgctggtggcttcatcacacagcaatactttgggattgctggctaacgcacgggcaattgccacacgttgtttctgcccaccggaaagattgctcgggtagctatcatgcttatcgccaagaccaaccaaactcagcaattccgtcacgcgacgtttgacctcgtctttcggtgtgttgtccagctccagcggcagagccacgttgccaaaaacagtacggctagagagcaggttaaaatgctggaaaatcataccaatctggcggcgagctttggtcaactcggattcactcagcgtggtcagttcctggccatcgaccagcacgctaccctcggttgggcgctccagcaggtttacacaacgtataagcgtactcttacccgcgccactggcaccgataacgccataaatttgtccagctggcacatgcaggctgacgttgttcaacgcctggatggtgcgggtgccctggtggaacactttggtgatattgctaagttttatcattgattatttattatcgtcattaagttagtcgtggcatctcgaatgcctgaaacgggcaacgccgtcaatgaaatggatgttaaggcatccagacgtctaaatcaatcaggtttatgcgaagagcactttcttgcaggtcgaaacatgcgatactagcgtcacatgccttattaaggagctataaaaggtggcgaagagcgtacccgcaatttttcttgaccgtgatggcaccattaatgtcgatcacggctatgtccatgagatcgacaactttgaatttatcgacggtgttattgacgccatgcgcgagctaaaaaaaatgggctttgcgctggtggtagtaaccaaccagtctggcattgctcgcggtaaatttaccgaagcacagtttgaaacgctgaccgagtggatggactggagcctggcggaccgagatgtcgatctggatggtatctattattgcccgcatcatccgcagggtagtgttgaagagtttcgccaggtctgcgattgccgcaaaccacatccggggatgcttttgagtgcacgcgattatttgcatattgatatggccgcttcttatatggtgggcgataaattagaagatatgcaggcagcggttgcggcgaacgtgggaacaaaagtgctggtgcgtacgggtaaacctattacgcctgaagcagaaaacgcggcggattgggtgttaaatagcctggcagacctgccgcaagcgataaaaaagcagcaaaaaccggcacaatgattaaaagatgagcggttgaaataaaaatgcatttttccgcttgtcttcctgagccgactccctataatgcgcctccatcgacacggcggatgtgaatcacttcacacaaacagccggttcggttgaagagaaaaatcctgaaattcagggttgactctgaaagaggaaagcgtaatatacgccacctcgcgacagtgagctgaaagccgcgtcgcaactgctctttaacaatttatcagacaatctgtgtgggcactcgaagatacggattcttaacgtcgcaagacgaaaaatgaataccaagtctcaagagtgaacacgtaattcattacaaagtttaattctttgagcatcaaacttttaaattgaagagtttgatcatggctcagattgaacgctggcggcaggcctaacacatgcaagtcgaacggtaacaggaagaagcttgcttctttgctgacgagtggcggacgggtgagtaatgtctgggaaactgcctgatggagggggataactactggaaacggtagctaataccgcataacgtcgcaagaccaaagagggggaccttcgggcctcttgccatcggatgtgcccagatgggattagctagtaggtggggtaacggctcacctaggcgacgatccctagctggtctgagaggatgaccagccacactggaactgagacacggtccagactcctacgggaggcagcagtggggaatattgcacaatgggcgcaagcctgatgcagccatgccgcgtgtatgaagaaggccttcgggttgtaaagtactttcagcggggaggaagggagtaaagttaatacctttgctcattgacgttacccgcagaagaagcaccggctaactccgtgccagcagccgcggtaatacggagggtgcaagcgttaatcggaattactgggcgtaaagcgcacgcaggcggtttgttaagtcagatgtgaaatccccgggctcaacctgggaactgcatctgatactggcaagcttgagtctcgtagaggggggtagaattccaggtgtagcggtgaaatgcgtagagatctggaggaataccggtggcgaaggcggccccctggacgaagactgacgctcaggtgcgaaagcgtggggagcaaacaggattagataccctggtagtccacgccgtaaacgatgtcgacttggaggttgtgcccttgaggcgtggcttccggagctaacgcgttaagtcgaccgcctggggagtacggccgcaaggttaaaactcaaatgaattgacgggggcccgcacaagcggtggagcatgtggtttaattcgatgcaacgcgaagaaccttacctggtcttgacatccacagaactttccagagatggattggtgccttcgggaactgtgagacaggtgctgcatggctgtcgtcagctcgtgttgtgaaatgttgggttaagtcccgcaacgagcgcaacccttatcttttgttgccagcggtccggccgggaactcaaaggagactgccagtgataaactggaggaaggtggggatgacgtcaagtcatcatggcccttacgaccagggctacacacgtgctacaatggcgcatacaaagagaagcgacctcgcgagagcaagcggacctcataaagtgcgtcgtagtccggattggagtctgcaactcgactccatgaagtcggaatcgctagtaatcgtggatcagaatgccacggtgaatacgttcccgggccttgtacacaccgcccgtcacaccatgggagtgggttgcaaaagaagtaggtagcttaaccttcgggagggcgcttaccactttgtgattcatgactggggtgaagtcgtaacaaggtaaccgtaggggaacctgcggttggatcacctccttaccttaaagaagcgtactttgcagtgctcacacagattgtctgatgaaaatgagcagtaaaacctctacaggcttgtagctcaggtggttagagcgcacccctgataagggtgaggtcggtggttcaagtccactcaggcctaccaaatttgcacggcaaatttgaagaggttttaactacatgttatggggctatagctcagctgggagagcgcctgctttgcacgcaggaggtctgcggttcgatcccgcatagctccaccatctctgtagtggttaaataaaaaatacttcagagtgtacctgcaaaggttcactgcgaagttttgctctttaaaaatctggatcaagctgaaaattgaaacactgaacaatgaaagttgttcgtgagtctctcaaattttcgcaacacgatgatggatcgcaagaaacatcttcgggttgtgaggttaagcgactaagcgtacacggtggatgccctggcagtcagaggcgatgaaggacgtgctaatctgcgataagcgtcggtaaggtgatatgaaccgttataaccggcgatttccgaatggggaaacccagtgtgtttcgacacactatcattaactgaatccataggttaatgaggcgaaccgggggaactgaaacatctaagtaccccgaggaaaagaaatcaaccgagattcccccagtagcggcgagcgaacggggaggagcccagagcctgaatcagtgtgtgtgttagtggaagcgtctggaaaggcgcgcgatacagggtgacagccccgtacacaaaaatgcacatgctgtgagctcgatgagtagggcgggacacgtggtatcctgtctgaatatgggggggaccatcctccaaggctaaatactcctgactgaccgatagtgaaccagtaccgtgagggaaaggcgaaaagaaccccggcgaggggagtgaaaaagaacctgaaaccgtgtacgtacaagcagtgggagcatgcttaggcgtgtgactgcgtaccttttgtataatgggtcagcgacttatattctgtagcaaggttaaccgaataggggagccgaagggaaaccgagtcttaactgggcgttaagttgcagggtatagacccgaaacccggtgatctagccatgggcaggttgaaggttgggtaacactaactggaggaccgaaccgactaatgttgaaaaattagcggatgacttgtggctgggggtgaaaggccaatcaaaccgggagatagctggttctccccgaaagctatttaggtagcgcctcgtgaactcatctccgggggtagagcactgtttcggcaagggggtcatcccgacttaccaacccgatgcaaactgcgaataccggagaatgttatcacgggagacacacggcgggtgctaacgtccgtcgtgaagagggaaacaacccagaccgccagctaaggtcccaaagtcatggttaagtgggaaacgatgtgggaaggcccagacagccaggatgttggcttagaagcagccatcatttaaagaaagcgtaatagctcactggtcgagtcggcctgcgcggaagatgtaacggggctaaaccatgcaccgaagctgcggcagcgacgcttatgcgttgttgggtaggggagcgttctgtaagcctgtgaaggtgtactgtgaggtatgctggaggtatcagaagtgcgaatgctgacataagtaacgataaagcgggtgaaaagcccgctcgccggaagaccaagggttcctgtccaacgttaatcggggcagggtgagtcgacccctaaggcgaggccgaaaggcgtagtcgatgggaaacaggttaatattcctgtacttggtgttactgcgaaggggggacggagaaggctatgttggccgggcgacggttgtcccggtttaagcgtgtaggctggttttccaggcaaatccggaaaatcaaggctgaggcgtgatgacgaggcactacggtgctgaagcaacaaatgccctgcttccaggaaaagcctctaagcatcaggtaacatcaaatcgtaccccaaaccgacacaggtggtcaggtagagaataccaaggcgcttgagagaactcgggtgaaggaactaggcaaaatggtgccgtaacttcgggagaaggcacgctgatatgtaggtgaagcgacttgctcgtggagctgaaatcagtcgaagataccagctggctgcaactgtttattaaaaacacagcactgtgcaaacacgaaagtggacgtatacggtgtgacgcctgcccggtgccggaaggttaattgatggggttagcgcaagcgaagctcttgatcgaagccccggtaaacggcggccgtaactataacggtcctaaggtagcgaaattccttgtcgggtaagttccgacctgcacgaatggcgtaatgatggccaggctgtctccacccgagactcagtgaaattgaactcgctgtgaagatgcagtgtacccgcggcaagacggaaagaccccgtgaacctttactatagcttgacactgaacattgagccttgatgtgtaggataggtgggaggctttgaagtgtggacgccagtctgcatggagccgaccttgaaataccaccctttaatgtttgatgttctaacgttgacccgtaatccgggttgcggacagtgtctggtgggtagtttgactggggcggtctcctcctaaagagtaacggaggagcacgaaggttggctaatcctggtcggacatcaggaggttagtgcaatggcataagccagcttgactgcgagcgtgacggcgcgagcaggtgcgaaagcaggtcatagtgatccggtggttctgaatggaagggccatcgctcaacggataaaaggtactccggggataacaggctgataccgcccaagagttcatatcgacggcggtgtttggcacctcgatgtcggctcatcacatcctggggctgaagtaggtcccaagggtatggctgttcgccatttaaagtggtacgcgagctgggtttagaacgtcgtgagacagttcggtccctatctgccgtgggcgctggagaactgaggggggctgctcctagtacgagaggaccggagtggacgcatcactggtgttcgggttgtcatgccaatggcactgcccggtagctaaatgcggaagagataagtgctgaaagcatctaagcacgaaacttgccccgagatgagttctccctgactccttgagagtcctgaaggaacgttgaagacgacgacgttgataggccgggtgtgtaagcgcagcgatgcgttgagctaaccggtactaatgaaccgtgaggcttaaccttacaacgccgaagctgttttggcggattgagagaagattttcagcctgatacagattaaatcagaacgcagaagcggtctgataaaacagaatttgcctggcggccgtagcgcggtggtcccacctgaccccatgccgaactcagaagtgaaacgccgtagcgccgatggtagtgtggggtctccccatgcgagagtagggaactgccaggcatcaaattaagcagtaagccggtcataaaaccggtggttgtaaaagaattcggtggagcggtagttcagtcggttagaatacctgcctgtcacgcagggggtcgcgggttcgagtcccgtccgttccgccacttattaagaagcctcgagttaacgctcgaggttttttttcgtctgtatatctattattgccagaatcgcaaaaatcctctgcattttacgctctttttcctcaacagtctgaagcccataatcacctcagttaacgaaaatagcattaaaagaggcatattatggctatccctgcatttggtttaggtactttccgtctgaaagacgacgttgttattagttctgtgataacggcgcttgaacttggttatcgcgcaattgataccgcacaaatctatgataacgaagccgcagtaggtcaggcgattgcagaaagtggcgtgccacgtcatgaactctacatcaccactaaaatctggattgaaaatctcagcaaagacaaattgatcccaagtctgaaagagagcctgcaaaaattgcgtaccgattatgttgatctgacgctaatccactggccgagtccagacgatgaagtctctgttgaagagtttatgcaggcgctgctggaagccaaaaaacaagggctgacgcgtgagatcggtatttccaacttcacgatcccgttgatggaaaaagcgattgctgctgttggtgctgaaaacatcgctactaaccagattgaactctctccttatctgcaaaaccgtaaagtggttgcctgggctaaacagcacggcatccatattacttcctatatgacgctggcgtatggtaaggccctgaaagatgaggttattgctcgtatcgcagctaaacacaatgcgactccggcacaagtgattctggcgtgggctatgggggaaggttacagtgtaattccttcttctactaaacgtaaaaacctggaaagtaatcttaaggcacaaaatttacagcttgatgccgaagataaaaaagcgatcgccgcactggattgcaacgaccgcctggttagcccggaaggtctggctcctgaatgggattaagcctctctgacagctcctccgggagctgtttttacatgctcgctaaggaaatcgataaaagcccggatgcgcgtacttaccgcacggtcgctgtaatagacggcactgaatggcatttccactggcaacactttatctgccattaactccaccaattctccgcgagcgatttctttgtcgatcatgtagtcggacaaacacgcaatcccgttgccactcaggcaaagctgtttcagtgtttccccactattggaactcaaaccgtacttcacctcatgtaattgtccatcgctacgggctatcggccaggtattgagggaagcgggttcagtgaatcccaggcaaatatgttgctttaaatcgtcgatcgtttctggcttcccgtagcgggaaatataatcgggggaggcgataatttttcgataactgttaaataacggcctggcacgtaagctggaatccgttaacgtaccagcgcgtatcgcgacatccacttttctttcgatcaaattaataatcgtttcggaggagactaggctcaaagtgacttccggatagcgttcacggaaaggcttaattaacggcatcagaaagtgcagcaccactggagttgcggcatcgatccgtaacagtccacgcggtgtattacgcgtctccataatttcactttctgccgctgccatctcctgcaaaatactctgtacgcgacgaaaataacgctcgccttcttccgtcaggctaagttgtcgcgtggtccgattaagcaggctaacgccaagtttcatctccagctttttcaccgcccggcttaccgcactgtttgcttgccctaattgttccgctgcccggctaaagctgccgctttcgacgacgctaacaaaaatggcgagttcttcgctcgtggctttcatttttgctcctgttgcaaaatagaagagatattttgaatttatttgtcattaaaccatcaggatgcgtgatatgtcatgcgatttaatgttctccataatgagcaaaattctgaccggtgtaagcacttgcttacataacaatatacaattgctcgttgaaagagtgagctaaaatccctataacagtagaaccctcccgagtgcggaagggttgacgtaatagaggtttcaaagtcaaaagtgcgaaaaaacacctatgccatgcgctatgttgccggacaacctgcggaaaggatcttaccgccggggtcttttgcgagcatcggccaggcattaccacctggggaaccgttaagtaccgaagagcgtattcggatcctggtgtggaacatatacaaacagcaacgcgctgaatggttgagcgtattaaagaactacggcaaagatgcacatctggtgttattgcaggaagcgcagacaacgccagagttagtacagtttgcgaccgctaactatcttgccgccgatcaggtacccgctttcgtgctgccacaacatccttctggcgtaatgacccttagcgcggcacatccagtgtattgctgcccgttacgtgaacgagaacccattttgcgtctggcgaagagcgcactggtgacggtctatccattacctgacacccgcctgttgatggtggttaatatacacgccgtcaacttcagtctgggcgtggatgtctatagtaagcagttacttcctattggcgatcagatagctcaccacagcggcccggtcattatggcgggagatttcaatgcctggagccgtagaaggatgaacgcgttatatcgctttgcgcgggaaatgagcctgcgccaggtgcgttttaccgatgatcagcgccgtcgggcgtttggtcgcccgctcgattttgttttctaccgtggtctgaacgtcagtgaagcttctgtactggttacgcgcgcttccgatcacaatccgctactcgttgaattcagtcccggcaagcctgataaataaggtatgagtggtctgccacagggcagaccaacgtttggcgctgcgcaaaacgtgagcgcggtggtggcgtatgacttatctgcccacatgctggatgtcgtggcacaagctgccgaagcccggcaactgaaaaatatcaccacccgccagggatatgccgaaagtctgccatttgccgataacgcatttgatattgttatcagccgttattctgcccatcactggcatgatgttggtgcagcactgcgagaagtgaataggatattgaaacctggcggtaggctgattgtgatggacgtaatgtctccgggtcacccagtgcgcgacatctggttacagacggtagaagcattacgcgatacctctcacgtacgaaactacgccagcggtgagtggttgacgttaatcaatgaagccaatctgatagttgataatttaattacagataagttaccgctggaattttctagttgggtcgcgagaatgcgtacgccagaagcgttagtagacgctattcgcatttaccaacagagcgcaagcacagaggtgagaacgtattttgccttgcagaatgatggctttttcaccagtgatatcatcatggtagatgcacataaagcggcataaataaaaaaggcaccgggggaatcggtgcctttttattatctggtttgtcaggaatctggcatgttgttgtttttcacaaacaacgtcagcttatcgcctggttgcagattcgcagtgtcgctgttccagcgcatcacatctttgatgttcacgccgtggcgtttagcaatgctactaaggctatcgcctttgcgcacacgatacgtaatgctatcgctgttgtttgccagtcgctgtgcgctactgcctgcaccaatcgtcaaactttggcctggcttcagcttagatccgcgcagtttgttccactgctgcaaatctttggtgcttacgccgagacgactagcgatactactaagcgtgtcgccagagcgtacggtgtaaacacggctgttaagcggcgtattgtcggcaaccagcgtgctctgtacagcagcaatttcgccactagccagagattcacgcagttgatctgcatgcttctttggcaccatcacgtactgcgggccacttgcgcccagcgtggagccttttacgccagcgttgaatgtcttcagcttgctgacggaaatccccgccatatctgctaccttcgccatttcaaccgggctgctcaggtgcacacgcgccagagcacggctttcatcggtcgttggcagacgtacgccataacgcttgctgtttttgagaatatcactcaatgccagcattttaggcacgtactgcttcgtttcctgcggcaacggtaagctccagaagtccgtggatttcccacgcgctttgttcgttttaattgccttcatgacccgaccttcgccgctgttataagccgctacggtcagaagccagtcgccgtcaaacattttgttcagacgctgcatcatattcagcgcggcagttgcactagcaacaacatcgcgacgcgcgtcataattgcgggtctgtttcaaaccataattgcgccccgtgctcggaatgatctgccagatgcctgcggcattggcgccagacgttgcgtgaggatcaaaagcgctctccactatgggtagtagtaccagttccataggcatgttacgttttttaacttgccctgctatccagtacatatacggctctgcccgtaaagttacatcgtggagatagctcttattgcgtaaatatttctgtttctgttcgcgaatccggtcattttccggaattcccatctttagctcgtcgccaatgaaagcccacaagtcaccatctggcgcgatagacgtcccatcgtccatccatcgtgcctgacttgtaaactttgctgcttccccttgaccagctgcagaaaggctctgtgcgtgctgttgaacgttgccggtactctggcaacccacgagcaggacagaggcgagtaatatcgcttttgccttcatgtgtgtgtcaatagttgcttaaaagacgaccgatcataacggcgaacggagccgatgacaagaaagttttatcagaacctatctttcttactccttaaccatgcaaaacgctcttcaggttgttgcaataatgtttcttcattaattacattaattaaatcaatatcttccgttcttaaaaaaacattaatttgccgctcatttttcagaattacgggtagtgttatttgattttttgcccgtaactccttaactttacgataataatcatttatggacaaatcgtgcggaagaatactcaaagcaaacttcatattacttaaggtatattcatgagcacaacataccaatgtatcgtcaggtaacgcacttaactttttaagactttgatacatttgacttgctgtcccttcaaacaaccgaccacacccaccagaaaacagtgtgtcgccgcaaaatagataaggtttactgaagtaacagatatgtcctaaagtgtgacccggcgtagcaattacactaaattcatgccccaaaacgaaggcagtttcgccatctttgactacctgtgttgttcccttatcttgtgtctcttgtggaccatacaccacaatttgtggaaacttttccaccagttcttttacgccgccaacgtgatcgtggtgatggtgggtgagaaatatggcctccggttgccagttattggcggcaatggcgtttaatactggctctgcgtctccgggatcgacaatcaggcagcgacctgcttcatcattcaaaacccagatgtaattgtcatcaaaggcgggaatactgttaagattcatagattacctctcagtgtgaaacggaaggttgtgatgaaaccggcaagagtccctcaaactgtcgtggctcctgattgctggggcgatttgccctggggaaagctttatcgcaaggcgctggagcgccagctcaacccgtggttcactaaaatgtatggttttcatctgcttaagattggcaatttaagcgcagaaatcaattgcgaagcgtgcgcggtttctcatcaagtgaatgtttctgcgcaaggaatgcccgtccaggtacaggcggacccacttcatcttccttttgccgataaatccgttgatgtttgtctactggcacatacattgccgtggtgcaccgatccgcatcgtttattgcgtgaagccgatcgggtattgattgatgatggctggctggtcattagtggcttcaatcccatcagttttatgggattacgcaaacttgtgccggtattgcgcaaaaccagcccctataacagccggatgtttactctgatgcggcagctggactggctctctttgttgaattttgaagtgctacacgccagccgtttccacgttctcccgtggaacaaacacggaggaaaactattgaatgcgcatattcctgcgcttggttgcttacaacttattgttgcccggaaacggactattcctttaacgctaaatccgatgaaacagagtaaaaacaagccacgaattcgccaggcggttggagccacccggcaatgtcgtaaaccacaggcttaaacttcaacttggtagcctgtatcttccagtgtgggattcatcgccgcggcacgagccagttcatcacagcgttcgttttccgggtgtccggcatggcctttaacccattcccatttgatttgatgctgccccaatgcagcatcaagacgttgccagagatcgacattttttactggttttttgtctgcggttttccagccacgttttttccagttatggatccactgggtgataccctggcggacatactggctgtcggtactcaaaatgacttcgcaatgttcttttaacgcctccagcgcgacaatagcggccatcaactccatacggttgttggtggtgcgggtgtagccagcgctaaaggttttctcgcgtccgcgatagcgtaaaatagcgccgtaacccccaggtcctggattgcccagacagctaccatcggtgaaaatttctacctgtttaagcatctctggtagacttcctgtaattgaatcgaactgtaaaacgacaagtctgacataaatgaccgctatgagcactgcaattacacgccagatcgttctcgataccgaaaccaccggtatgaaccagattggtgcgcactatgaaggccacaagatcattgagattggtgccgttgaagtggtgaaccgtcgcctgacgggcaataacttccatgtttatctcaaacccgatcggctggtggatccggaagcctttggcgtacatggtattgccgatgaatttttgctcgataagcccacgtttgccgaagtagccgatgagttcatggactatattcgcggcgcggagttggtgatccataacgcagcgttcgatatcggctttatggactacgagtttagcttgcttaagcgcgatattccgaagaccaatactttctgtaaggtcaccgatagccttgcggtggcgaggaaaatgtttcccggtaagcgcaacagcctcgatgcgttatgtgctcgctacgaaatagataacagtaaacgaacgctgcacggggcattactcgatgcccagatccttgcggaagtttatctggcgatgaccggtggtcaaacgagcatggcttttgcgatggaaggagagacacaacagcaacaaggtgaagcaacaattcagcgcattgtacgtcaggcaagtaagttacgcgttgtttttgcgacagatgaagagattgcagctcatgaagcccgtctcgatctggtgcagaagaaaggcggaagttgcctctggcgagcataaatacctgtgaaaggcgctaaaaatagcgacttgggcgatttttgcagcaaacgattcaaaagatgagaaaaaccgttgacgaaggtcgaggcaatccgtaatattcgcctcgttcccaacggaacacaacgcggagcggtagttcagtcggttagaatacctgcctgtcacgcagggggtcgcgggttcgagtcccgtccgttccgccactattcactcatgaaaatgagttcagagagccgcaagatttttaattttgcggtttttttgtatttgaattccaccatttctctgttcaatgattttactctggcgtaggtgcgtgattctcgcttgttgtctcattcattaaaattcaataatgatatcgaaccattcagcttaaatatatttctagagaataaatttatattgattaaatgaatgtatatttcaaattgattttgtttgttattatttaagtgaggtatataattagagtccgttatcaatgctaaatattctaatcattatgacaggcgagggagtgtccaattatgaatagtaaaaagctttgttgcatatgtgtgttattcagcctgcttgcaggatgtgcctctgaatcttctattgatgaaaagaagaaaaaagctcaagtcacacaaagtaatattaataaaaacactccccagcaactgacagacaaagatttattcggtaatgaaaccactctggccgtatccgaagaggatattcaagctgcgcttgatggagatgagttccgcgttccccttaattctcctgtaatacttgttcaatccggcaaccgcgcaccggaaaccattatgcaggaggagatgcgaaaatattatactgtttccacattctctggtatcccggacaggcaaaagcctctgacttgtaacaaaaacaaagataaaaatgagaacgaggatgttgccagtgctgagaatatgaactggatgcaggcactgcgttttgtggctgcaaaaggacatcagaaagcgattattgtttaccaggatatgttgcagacaggaaaatatgactctgcgctgaaaagtacagtatggtccgactataaaaatgacaaactcactgacgctatctccctgcgctacctggtacgtttcacgctggtggatgtggcaacaggtgagtgggctacctggagcccggtgaattatgaatataaagtgcttccaccattgcccgacaagaatgaagccagtacgactgatatgacagagcagcaaatcatgcaacttaagcaaaagacctataaagcgatggtaaaagatttggttaaccgctatcaataataaattatatctgccgccaggaatttctggcggcaataatacaaaattctttgcataagaaatttttcttgacaaagacagtgcaagaaaggacatggaatccggagttaaaaactgtttgttttagaatatttaattatttaactgctgaatcttccttgcgagaaatatatccattattacatttcatgccatttttaatatagattgctcctgggaaaattcccgtattattaccgcaggggtgataattagtattgacatatcctgtgacaaaaggagctattaaaggtgctattacgatagctattagtaaaaatataagagttagctgtattgttatgtctgtggcgaaattgactaccttcgtttttttgattaagaatgattttattatcgtaagtaaaattacatgaatatttaaaaaggaaaacgacatgaaaccgaagcacagaatcaacattctccaatcataaaatatttccgtggagcattttattattgaatatagaggtttaactccggtaaaaaacaaagaagcattgaatgcagggaaaaataatatggccataaaaaacatcgaaagaaactcttttaatttaacatgtaaacgcatggttaatcctcatatcacgggtggagtgttaagaacatacataaatggagtcatgttttcccttttccatttatcaagttcctgttgccgttttagtccatctctaattgcatattttaatttttcacttaaatggcattgagcatcgatttcatttaaaacaactgtacacactatccctgtcagtaaaattgctcctccgacaagaattactggaaagccaaagctaacacaggcaaaagaagccagacttccaatagcggttgcaacaccaccggctataactgctttggccacatccatactaaaatcgccaagaaaattaaccagatctcgctcactactcataataaattctatggttctgctgatttaaccgcagagaagttcgccacagcaatccgaaaccactggcacgtggagaataagctgcacaggcgtctggacgtggtaatgaatgaagacgactacaaaataagaagaggaaacgcagcagaattatttagtgggatacggcacattgctattaatattttgacgaatgagaaggtattcaaggcagggttaagacgtaagatgcgaaaagcagccatggacagaaactacctggcgagtgtccttgcggggagcgggcttagctaataataccccgactctccccgtccttaaacacaacccccactcaccacaacctaaactcatccgcatcctgccatgccggaaacttttctctatattcccgcaatgctgccatgctcagctccgcatcaatgcgcgttgcctgatgcgcgtcggcagtagcgataatctctccttgcggattaatcacccggctgtcaccgcgataatggcagccgttgccatcgctgccgacgcgattgcatcccgccacatacgcctgattctcaatcgcgcgggccgtcagcaatgcctgccagtgcagagagcgcggagcaggccagttggcgacgtacagggcgaggtcataatcgttgagattgcggctccacacaggaaaacgtaagtcgtagcacaccagcggcaaaatacgccagccgcgccattccacaatcactcgcgcattgcccgctttataatgtagatgctcatctgccatgcggaacagatgacgcttatcataaaaatgtaccgtgccgcccggctcaaccagcaaaaagcggttaacgctaccagactccgtttgtaatgcaacactgcctgcaatcagcgcattgcactgctgcgccttagctgtcatccagttcactacgtcatcttgtgctaggctgctagctgccgcttccatggcaaagccgctggtaaacatctccggtagaacgatcacatcgcgcccggtaataccttccagttgacgatcaaaatgacgcaggttggcaggaccatccatccacaccagtggttgctgcaaaagcgtaatcttcaaaccaggcacggtgtacaactcctttatgcgaagggttttataactttaacaccttatcaggcagttgccttagcgcagaataaattgataacaaatgctgatattggaaatatctgatttgcaaattatcgtgttatcgccaggctttaggaggttaataacatgggcaggataagcagcggaggaatgatgtttaaggcaataacgacagtcgccgctctggtcatcgccaccagtgcaatggcgcaggatgatttaaccattagcagccttgcaaagggcgaaaccaccaaagctgcatttaatcagatggtacaagggcataagctgcctgcctgggtgatgaaaggcggtacttatactcccgcacaaaccgtaacgttgggagatgagacgtatcaggtgatgagcgcgtgcaaaccgcatgactgtggcagccaacgtatcgctgtgatgtggtccgagaaatctaatcagatgacggggctgttcagcactattgatgagaaaacgagccaagagaaactcacctggctgaatgtgaacgatgcgcttagcattgatggtaaaacggtgttgttcgcggcgttgaccggcagcctggaaaaccatccggatggctttaattttaaataattagcggataaagaaacggagcctttcggctccgttattcatttacgcggcttcaactttccgcactttctccggcaactttaccggcttcgtcgccagctcttccggatcaaagtcatcaacgttaatactgcgcagacggctttcttcagctttcaccagaatagcggcttcatctttatcaatcagccccttcaccagcgcgttgtgcgccagttcatccagacgggtaaacggcaggtttttacccagctctttacagatccgctgatgaattgggtcggcggcaatcacatccaccagcgcctcttccagcaagccaaccggattatgctcgctcggcgtcaggtactgaccgcgaccaatgcgggaacgggtggcgttcggcacttgtaaaatcttcgccactttatgatccagcttgtcagaaggtgccagataatgacgtccggtcgggaagatcaccacattcagcagcccggcaaccacgcggttcgggaagttttgcagtaaatcatccatcgcctgttcagcctgatacagcgcatcttgtacgccccagtgcaccagcggcaggtcggcttcattacggccttcgtcgtcataacgcttcagcacggcagaggcgaggtagagctggcttaaaatatcccccagacgggcgctgatgcgctcgcgacgtttcaggctgccgcccagcactgccatgctgacatcagaaagcagggcgaggttggcgctcaggcggttcaggtgctgatagtagcgtttagtggcatcgccggttggcgtgctgctggttaaaccgcgcgtcaggcccagccagaagctgcgaactttgttgctaccgacgtgaccgatatgtttgaacaacagtttatcgaacgcgttgacgtcattgttcttcgccgcttccatctcttccagcacgtacggatggcaacgaatcgctccttgtccgaagatcatcatgctgcgggtcagaatgttagccccttcaacggtgatggcaatcggtgcgccctggtaagcacgcgccaggaagttgctttgcccgagcataatgcctttaccgccggtaatatccatcgcatcaataatgttctgctgcccgcggtgggtacagtgatacttaacgatagcgctcagcacggcaggtttttcgccgagcataatgccgtaggtaatcaggcttgccgcagcatccatcacgtaggcattaccggcaatacgcgccagcggctcttcaatcccttccatcttaccaatagagattttgaactgacggcgaatgtgagcatacgcgccggttgccagcgctacgcttttcacgccgccggtactgttggaaggcagggtgatgccgcggcctacgctgaggcactccaccagcatccgccagccttgcccggccattttcggcccgccgatgatgtaatcgatcggcacgaagacatctttaccgcgcgtcggtccgttctggaacggtacgttcagcgggaagtggcgacgaccaatttccacgcccggcgtggtggttgggatcagcgcacaggtaatgcctaaatcttctgcaccgccgagtaatttttccgggtcggagagtttaaacgccagcccaagcacggtcgcaatcggtgccagcgtaatgtagcgtttgttccaggtcagacgcatccccagcacctgctggccctgccattcgcccatgcagacaatcccggtgtccggaatcgcgcccgcatcggaacccgcttccgggctggtcagtgcaaagcaggggatctcctgaccacgcgccagacgcggcagatagtgatctttctgctcgtcagtgccgtaatgttgcaacagttcgcccgggcctaaactgtttggcacgccgacggtaatcgccaggatcccgctcacgccggagagtttttgcagcacgcgagactgggcataagcgctgaactccagcccgccgtactcttttttgatgatcatcgcgaagaaacgatgctctttaaggtacgcccacaactccggcggcagatccgccagctcatgggtgatctggaaatcattcgccatccggcaggcttcttctaccgggccgtcgagaaacgcttgctcttcggcggtcaggcgcggctgcggatagttatgcagctttttccagtccggcttgccctggaacaagtcgccctcccaccaggtggtgcccgcatcaatcgcttctttctcagtgcggctcatcggcggcatcaccttacggaaaccgcgaaataccggcgcggaaatcatgctcttacgcataggcgcaaagttaaatggcacgaggataatggccagaggcaccagtacccacgcgctccacagaccagcaacgccgagggcggctgtccaggcgagcaaaatcagactgctgataaataagctcacgcggtgatagaacaacgcgccgagcaggacaaccgtagcgagaatactcaaaatcatcataacgaaaagccccttacttgtaggaggtctgaccacttgtgatgatatggttgtagtggatgtaaaaacatttagcaatatgtttacaatataattacaacaaagctcacattgttgctgtttttatccgcacttcaggtcaaaaagtcctggtcatagcacctgcccgtacttctcgcttttggcggtatccggtacactgcattttgtctattacatttatgctgaaggatatcctcatgtaccaggatcttattcgtaacgaactgaacgaagcggcggaaacgctggctaactttttaaaagatgacgccaatattcacgccattcagcgcgcggcggtcctgttagcagacagctttaaagccggtggcaaagtgctttcctgcggcaacggcggttcccattgcgacgctatgcactttgccgaagagttgaccggtcgctaccgtgaaaaccgtccgggctacccggcgattgctatttctgacgttagtcatatttcctgcgtcggtaatgatttcggtttcaatgatattttctcccgctacgttgaagcggtaggtcgcgaaggcgatgtactgctggggatctccacctccggtaactctgcaaacgtgatcaaagcgatcgcagcggcgcgtgagaagggaatgaaagtgatcaccctgaccggtaaagacggcggcaaaatggctggcacggcggatatcgaaattcgcgtaccgcactttggttatgccgaccgcattcaggagattcacattaaagtgatccatatcctgatccagttgattgaaaaagagatggttaagtaagtctggcgtaggccggataagacgtttacgccgcatccggcatttgtgcgctgatgcctgatgcgacgctgacgcgtcttatcatgcctacaaatctgtacgcgaaccgtaggccgaataatgcgttcacgccgcatccgacctgaaaattcttaaatcaatcttcgccgggggccatgcgctcccgctgttgtggaggttacccatgtgcgaattgctcgggatgagcgccaacgtccctaccgatatctgctttagtttcaccgggcttgtacagcgtggtggtggaaccgggccacataaagatggctggggcattaccttttacgaaggtaaaggctgtcgcacatttaaagatccacaacccagctttaattcccccatcgccaaacttgtccaggactacccgataaaatcctgtagcgtggtggctcatattcgccaggctaatcggggcgaggtggcgctggaaaatactcacccatttacccgcgagttatgggggcgtaactggacttatgcccataacggacaactgacgggctacaaaagtctggaaaccggcaacttccgcccggtaggcgaaaccgacagcgaaaaagccttctgctggctcctgcataaattaacgcagcgttacccgcgcacaccgggcaacatggcggcggtatttaaatatatcgccagtctggcggatgaactgcggcagaagggcgttttcaacatgctgcttagcgacgggcgctatgtaatggcgtattgcagcactaatttacactggatcacccgccgcgcgccgtttggcgtggcaacgttgctggatcaggatgtggaaatcgacttcagcagccagaccacaccgaatgatgtggtcacggtgattgcaacacagccgctgacgggcaatgaaacctggcaaaagattatgccaggcgaatggcgcttattttgcctcggggagcgtgtagtttgattattttgcctcggggagcgtgtagttacttgccagttgtggctgcacaacttcgtggcttaacggcttgctgaccacgtaacgaccattgaccacagaaacggttggtggcttacgggtttgctcaaagtagtcgtaacccggcttcagttgctcccagaagtccttaaagttggaatatttatggcgcttcatattggcgtcggtcatgcggaacgggtaaatactcacttgcacgctcggctgaccaaacaccagcgcaccagtaacgaactggaatatctcatcaataccctgattggtcattgcgtagcagccgatggaaacacaatcgccgtggatcatcaggtatttcccttcataaccatgcgcacggtcataggcattggggaaaccaatattaatcgctttgtagtaacggctgtctggttttaactgattacgctggacgctataaaacccttccgggcttttgaaatcgccctgacgctgttttggccctaagccgccggaatatttacagattttatagctgtcgagcagttgatattgctcgcccattttgacgtagagatcgagcgtacgttcttccttgaagatctggatgtagacaggggatcccatcaactgctgcttatactctttgctcacaggcgtggtagagctactgctgcccagcaaaccggcaaaactaacgcacgggatcaacaacatcgcaagaattaatgcgattttacgcatactgcttattccttgataaaacggttacacacgccaggacggcaaaatggatcccaaatcggaatagtctggatttggaaggctcacattatcaccaaaagagttttacgcaagcctgtcggcgcagggtttacaaatttcatcggaagcgggctttacccaaagagcgccgcgtgagttccagttctctcaaatcgtaaaagtttatcggtaagtttgtaaatcaggatccagtccggttcgacatgagcatcgcgataacctttccaactaccttgcagcgggtggtctttataaacagctggaagcggtaaagtattattgataagaagcgtcataagatatttcaatttattcatatccttatgacgcttttgtgcaagttttacatccttactatattgtccgctgtattcaatatccctttgaatcatatttaaattcctaatttatcaaataaatcatcggcgtctttggccttatgaacatcaatgccagcttcgctgtttttgatactttgaatggttaattgattaggctcgcgtaaatcaaacggcaatgccttttcacgcgcgacctttgtgagggttatgcgaaccaggtcagagatggtcagccccatcccggccagtacgtccgctgcctgattcttcagatcttcatcgattcgggcgcgaacaaacgcgttagcagccattggggtatctcctgtgctgtatatttattcagcttgaattgtagctcaaatgagcaacagcgacaatccatgagtaatttaataaacggatgtttttacataattaactgaaatatatatgttaattttataataatggtttattaagtttgttcagaaacgatccgggatacactgcaacattaaagcatgaccagccattattgagtatgtccttgccgagcattccatcctttgtattgagcggattactgttgatttgtttgccgttttctagttttgccagcgccaccacaagtcatatctctttcagctacgccgcccgccagcggatgcaaaaccgtgcgcgtttattaaaacagtaccaaactcatctgaaaaagcaggccagctatattgtggaaggcaatgccgaaagcaaaagggcgctacgccagcacaaccgggagcagataaaacagcatccagaatggtttcctgctccgctcaaggcgagtgacagacgctggcaggcgctggcggaaaacaaccactttttaagcagcgaccatctgcataacattaccgaagtggcgattcaccgcctggagcagcagcttggcaagccttacgtctggggcggtacgcggcctgataaaggctttgactgtagcgggttggttttttatgcctacaacaagatccttgaggctaagctcccgcgcacggccaatgagatgtaccactatcgccgggcaacgattgtggcgaacaacgacctgcgccggggagatttgctgtttttccatatccacagccgcgagatagccgatcatatgggcgtgtatttgggcgatgggcaatttatcgagagcccacgtaccggcgaaaccattcggataagccgattagccgaacctttctggcaggaccattttttgggcgcgcgcaggattttgacggaagagacgattttgtaagacggataaggcgtttacgccgcatccggcagttgtacgcaggtgcctgatgcgacgctggcgcgtcttatcatgcctacgagcccgcgaatatttgcgagccgctttcccgatataaaacaacctcattgccaacctttccttttcttcttaccgttgagaaaaaggagtcgccatgtctgaatatcgtcgttattacatcaaggggggaacatggtttttcacggtgaatttacgaaatcgtcgaagccaacttttgaccacccagtaccagatgctccgtcacgccattattaaagttaagcgagacaggccttttgaaatcaacgcctgggtcgttttgccagagcatatgcactgtatctggacattacctgaaggcgatgatgatttttccagccgctggcgggaaattaaaaagcaatttacccatgcttgtggattgaaaaatatctggcaaccacgtttttgggagcacgccatccgcaataccaaagattataggcatcatgttgattatatttatataaatccagtaaagcatggttgggtaaagcaagtgagtgattggccattcagtacgttccatcgcgatgtcgcgcgagggttatatcccatcgattgggcgggggacgtaacggattttagtgccggggagcgtatcattagttaattgtgcgcagatgcctgatgcgacgctagcgcgtcttatcatgcctacaaacttgtgccggatcggtaggccggataaggcgtttatgccgcatccggcagttatgcgcagatgcctgatgcgacgctggcgcgtcttatcatgcctacaaacttgtgcctgaacggtaggacggataaggcgttcacgccgcatccggcagttgtgcaccaatgctggatacttacatcaacgcccccataatcttcaactccagctcatccggcacttcgttatacgacagcacatgcagccccggcgcaaacaaccttgcataacgcgccagcaaagggcgcagctgcggtggcaccagcagcaccgggtctttccccgccgctttcatctgctctttcacctgtggcatcgtactctggaactggttgagcatattcggatcgaccggcacgctgtcgagcatcactttcccgccctgttgcgcctgattcaccacgttggtcagcagattttccagctcattattcagcgtatacaccgtcagctcctgcttgcgaacgaacggatgggtaatgctgcgccgcaatgccaggcgcacatcggccgccagcagaatatgatctttcgtcaccgtgctactggcgaccagcacggtggcgatggtgacgatatcgcgcagggaaacgccttcggtcagcagcgcccggtacactttcagcaactggctgtaattgagcgccgcgctcaaatcttccgccagacgcggtgccgtcgacgataaacggttatgcaactgcgtaatatcatcatagttaaacaaatcaggaatatagctgcgcacaatcttatttacatgggtagcgatcacgctggcgctgtcgatcacctgataccccatattcagcgccttcgctttctgcgccgcctggatccaggtgaccggcatcccgtacgccgggtcgttcccctgcacgccgtcaatctcgccgtaggtttcgctggagggcagggccatcagtttatccgccggaatatccgcttcatcagcctttatgccgttgatgaaaatggcgtactgactgggcttaaggcggaagttttcccgaatgcggatctccggcagcagcacgccgttgccgtcagaaatcacctgccgcacgccgcgaatccgctgggtgagcgggttaccctgtgctttgtccaccagcgccaccagtttgtaaccgaggcttaaactgataggctcgatcagcggaatggtttcccaactgacctgctgctcgctggtttcggtgatggtgcgggtcagcgtttcgaggcttttctcttccgcctccgccgccagcggctgtttgctcatccgccagccggtaaaaccaagcagggcgctgaacagcaaaaacggcaggtgcggcattcccggtaccaccgccagcacgaacataatcccggtggcggtgtagagcaccgacgggcttgccagcagctggttacgcacgtcatgggcgatatcgccgttgtcgctgacgcgggtgacgataatcgccgccgcggtggagagcagcagggaagggatctgcgccaccaggccgtcgccgatggtcatcagcacatactgctggaaggcagcatcggcgctcaggttgtatttgaagatcccgatacagacgccgccgatcaggttgatcgccagaatcatcatcccggcgatggcgtccccgcgcacaaacttcgatgccccgtccatcgcgccgtagaaatcggcctcgctggcaacatctttacgccgggtttgcgcctgcgcctggttgatcaatccggcgttaagatcggcgtcaatcgccatctgtttgccgggcatcgcgtctaaggtaaagcgggcagaaacctcggaaatacgctcggcccctttggtgacgacaataaagttgattgtcaacagcgtcagtaaatccgagcgtgaaagcattatcgccgcgctgcacgggcagtcgatttttaacggtggtgggctgtcgccgttaaataaaatcagcccgtctcatccgccaaaacctgccaccgtggcggtgccggaagagacggagaaaaaagcgcgtgatgtgaatgagaaaacggcgctgctgaagaagaaatccgccaccgagcttggtgagctggcaaccagtatcaacaccattgcccgtgatgcgcatatggaagcgaatctggagatggagattgttccccagggattacgcgtgctgattaaagacgaccagaaccgcgatatgtttgaacgcggcagcgcgaagattatgccgttctttaaaacgctgctggtggagctcgcgccagtgttcgactcgctcgataataaaattattattaccgggcataccgatgcgatggcctacaaaaacaatatctacaacaactggaacctttcgggtgaccgcgcgctttcggctcgtcgggtgctggaagaggccggaatgccggaagataaagtgatgcaggtaagcgcaatggcggaccagatgctgctggattccaaaaatccgcaaagcgcgggcaaccggcgcattgagattatggtgctgaccaaaagtgcgtccgatacgctgtatcaatactttggtcagcatggggataaagtggtgcagccgctggtgcaaaagctggataagcagcaggtgctttcgcagcgaacgcgttaaatgctgaatctttacgcatttctcaaaccctgaaatcactgtatactttaccagtgttgagaggtgagcaatgcgtaaaatcattcatgtggatatggactgctttttcgccgcagtggagatgcgcgacaatcccgccctgcgcgatatccctattgctattggcggcagccgcgaacgtcggggggtgatcagcaccgccaattatcccgcgcgtaaatttggcgtacgtagcgctatgccgacagggatggcgctcaaattatgcccacatctcaccttgcttccggggcgctttgacgcctacaaagaagccagtaatcatatccgtgaaatcttcagccgctacaccagccgcattgaaccgttgagtctggatgaggcttatctcgatgtcaccgatagcgtccattgccacggttctgcgaccctcatcgcccaggaaatccgccagacaatcttcaacgagctgcaactgacggcgtctgcgggcgtggcaccagtaaagtttctcgccaaaatcgcctccgacatgaataaacccaacggccagtttgtgattacgccggcagaagttccggcatttttacaaaccttaccgctggcaaaaatccccggcgtcggcaaagtcagtgcggcaaaactggaagcgatggggctgcggacctgcggtgatgtacaaaagtgtgatctggtgatgctgcttaaacgctttggcaaatttggccgcattttgtgggagcgtagtcaggggattgacgaacgcgatgttaacagcgaacggttgcgaaaatccgtcggcgtggaacgcacgatggcggaagatattcatcactggtctgaatgtgaagcgattatcgagcggctgtatccggaacttgaacgccgtctggcaaaggtaaaacctgatttactgattgctcgccagggggtgaaattaaagttcgacgattttcagcaaaccacccaggagcacgtctggccgcggctgaataaagctgatctaatcgccaccgcgcgtaaaacctgggatgaacgccgcggcgggcgcggtgtgcgtctggtggggctgcatgtgacgttgcttgacccgcaaatggaaagacaactggtgctgggattatgatgtatactattatgtatattctggtgtgcattattatgagggtatcactgtatgcatcgaattctcgctgaaaaaagcgtcaatatcactgagttacgtaaaaacccagctaaatactttattgatcaaccggttgcggttctttctaataatcgccccgcaggatatctcttaagtgccagcgcattcgaagcgttaatggacatgcttgctgaacaagaggagaaaaagcccataaaggcgcgcttccgtccaagtgctgcaagattagaggaaattacacgccgcgctgaacaatatcttaatgatatgacggatgatgatttcaatgactttaaggaataaggatgcgggtattcaaaacaaaacttattcgcctgcaacttacagcagaggaacttgatgcgttaacggcggattttatttcctataagcgtgacggtgttttgccagatatatttggtcgcgatgcactctacgacgactcctttacctggccattaatcaaatttgagcgagttgctcatattcatctggcaaatgagaataatccatttccgccacagttgcgccaattcagcagaacgaatgacgaagcgcatttggtatattgtcagggggcgtttgatgagcaagcatggttgctcattgccattctgaaacctgaacctcataaactggctcgagataacaaccaaatgcataaaattgggaaaatggcagaagcgtttcgcatgcgtttttgaatttatattatgaataacatacaaataagaaactatcagcctggcgattttcagcaactatgcgctattttcattagagcggttacgatgaccgccagtcagcattatagtccacaacaaatttccgcctgggcgcagattgacgaatctcgctggaaggagaaactcgcgaaaagtcaagtgtgggttgcgatcattaatgcacaaccggttggttttatttcccgcattgaacattatatcgatatgttatttgttgaccctgaatacacccgccgtggggttgccagcgctttgttaaaacctttgattaagtctgaatccgaacttacggtggacgcaagcataaccgcaaaacccttttttgaacgttatggttttcagacagttaagcagcagcgcgttgaatgccggggagcgtggtttactaatttttatatgcgatataaaccgcaacattaaatccagcttgcaatgaaaataacgcccgcctggtatgtgcgcgttttctgattccacaaactgcaaggaggtaaatcatgacaaatcctttatcaatgactctttgcagacctttccaggattaattctttttttcttgccctggattcgtctgccatttcctgatttttatatttatatactctaaataattcgagttgcaggaaggcgacaagcgagtgaatcgccaggagcttacataagtaagtgactggggtgaacgaacgcagtcgcagtacatgcaacttgaagtatgacgagtataaatggaatggtacatgggcaaatatattcgtcccttatccgatgcggtatttaccatcgcatctgatgacctgtggatcgagagtttagcgatccaacaattacacaccacggcaaatttacccaacatgcagcgcgtagtggggatgccagatttacaccccggacgcggctacccgattggcgcagcgttcttctctgttggtcgtttttacccggcaagacgtcgcggtaacggtgctggaaacagaaacgggccgctactctgacacactgcgtagcgcgctggtttctctcgatggcgataacgcatgggcattaagcgaaagctggtgtggcactattcagtggatttgtccgagtccgtatcggcctcatcatgggcgcaaaaactggtttctgggcattgggcgttttaccgctgatgagcaggaacaaagcgatgcaatccgttatgagacgctgcgtagcagcgggccgggcggtcaacatgtcaataaaaccgacagcgcggtacgcgccacgcatttggcatccggtattagcgtgaaggttcagagtgagcgtagtcagcatgctaacaagcggctggcacgattgctgattgcctggaagctggagcaacagcaacaggaaaatagcgcggcgctgaaaagccagcggcgaatgttccatcaccagattgaacgtggcaacccgcgacggacatttacagggatggcttttatcgaaggataatgaaggatgaaactgccggaaggcgattaaacgccatccggcagcaaatcaaataattacttcgccggaatttctttcagcagttcagtcagcagtgtccagtaatgacctacgctttcgatgtgaacttgctcatccggagagtgtggaccggtgatagttggcccgatagaaaccatgtccatttccggatacggttttttgaacagaccacattccaggcccgcgtggataatctggatgttcggcgtcttgttgaacaggcgctgataggtttcacgtaccagatgcatcaccggagaattagcgtccggctgccagccaggatatgcgcctttcgcttcggttttcgcgccagccagtttacccaggctatccagcatgctcaccacgtagtctttaccgctgtcgatcagactacggatcaggcagtgaatttctacgttattgtcagtcatggtcaccacaccgacgttcagggaggtttcaaccacacctttggctacatcggagttacgaatcacaccgttcggggtggcgttcagcagacgaataaaggtatcgcgagatttcgcaatcagggcagctttatcgttcgctacagagtccagcaacaaggccagatttttctctttttctgccagctcgtttttcaggatctcctgataggtattcaccagagatttcaggacgtcgactttatcagctgcgacagcaatggtcgcaaaggcttcacgcgggatggcgttacgcagtgtgccgccgttgaaatcgataaggcgcagatccagttcttccgcatgacccgccaggaagcgcaccagcagtttgttggcattacccagcccaacgtggatttccccgccggagtgaccgcctttcagaccttttaaggttaacttgaaggtttcaaaaccagctggaaccgcttcacgatctaaatgcaggttggaggtgaagtcgataccccccgcacaacccatgtagatttcaccttcttcttcggagtcggtgttaatcagaatatcagcctgcaaccagttgccctgtaagccgaacgcaccgtccataccggcttcttcggtcatggtcagcagcacttccagcgggccgtgaaccacgttttcgtcagccagaaccgccagcgcagaggccataccaatgccgttatccgcacccagcgtggtgccgcgcgctttaacccattcgccatcaatataaggctggataggatctttcgtgaagtcatgcacggtgtcgttatttttctgcggcaccatatcgaggtgggcctgtaagacgaccggtttacgattttccatacctgcggtagcaggtttacgaatcaggatattacctacctgatcgcgttcgacatggaaacctttctcttttgcccaaccaacaatgtattcagcgagttgctcttcatgataggacgggtgaggaatagaacagattttggcaaaaatatcccacagcggctgtggagataattgagacagttcagacacgttaagtctccttgtcgatcacccgcaaaacagtattgcaggtcacagggttagcagaaaatgttgtcaacacaagacaggcttgcgagatatgtttgagaataccactttatcccgcgtcagggagaggcagtgcgtaaaaagacgcggactcatgtgaaatactggtttttagtgcgccagatctctataatctcgcgcaacctattttcccctcgaacactttttaagccgtagataaacaggctgggacacttcacatgagcgaaaaatacatcgtcacctgggacatgttgcagatccatgcacgtaaactcgcaagccgactgatgccttctgaacaatggaaaggcattattgccgtaagccgtggcggtctggtaccgggtgcgttactggcgcgtgaactgggtattcgtcatgtcgataccgtttgtatttccagctacgatcacgacaaccagcgcgagcttaaagtgctgaaacgcgcagaaggcgatggcgaaggcttcatcgttattgatgacctggtggataccggtggtactgcggttgcgattcgtgaaatgtatccaaaagcgcactttgtcaccatcttcgcaaaaccggctggtcgtccgctggttgatgactatgttgttgatatcccgcaagatacctggattgaacagccgtgggatatgggcgtcgtattcgtcccgccaatctccggtcgctaatcttttcaacgcctggcactgccgggcgttgttctttttaacttcaggcgggttacaatagtttccagtaagtattctggaggctgcatccatgacacaggcaaacctgagcgaaaccctgttcaaaccccgctttaaacatcctgaaaccagcacgctagtccgccgctttaatcacggcgcacaaccgcctgtgcagagcgcccttgatggtaaaaccatccctcactggtatcgcatgattaaccgtctgatgtggatctggcgcggcattgacccacgcgaaatcctcgacgtccaggcacgtattgtgatgagcgatgccgaacgtaccgacgatgatttatacgatacggtgattggctaccgtggcggcaactggatttatgagtgggccacccaggcgatggtgtggcaacaaaaagcctgtgcggaagacgatccgcaactcagtggtcgtcactggctgcatgcggctacgttgtacaacattgccgcctatcctcatctgaaaggagatgacctggccgagcaagcgcaggctttgagtaaccgcgcctatgaagaggccgctcagcgtctaccgggcacgatgcggcagatggagtttaccgtacccggcggtgcgcccatcaccggctttttgcatatgccgaaaggcgatggcccgttcccgacggtattaatgtgtggtggtctggatgcgatgcagacggactattacagcctgtatgaacgttattttgcgccgcgcggcattgcgatgctgactattgatatgccgagcgtgggcttttctagtaaatggaagctcacccaggactccagcctgttgcatcagcacgtcttaaaggcgctgcctaacgtaccgtgggtggatcacactcgcgtcgcggcctttggtttccgtttcggcgctaacgttgccgtgcgtctggcataccttgaaagcccgcgtctgaaagcggttgcctgtcttggtccggtagttcataccctgttgagtgattttaagtgccagcaacaggtgccggaaatgtatcttgacgttctggccagtcgtttggggatgcatgatgcttccgatgaagcgttgcgcgtggagctgaatcgctatagtttaaaagtgcaaggattgctgggacgtcgctgcccaacgccaatgttaagtggctactggaagaacgatccgttcagcccggaagaggacagtcgcttaatcaccagtagttctgctgacggtaaattattagagatcccatttaacccggtgtatcggaattttgacaaaggtcttcaggaaatcaccgactggatcgaaaaacgcttgtgttaaaaatttgctaaattttgccaatctggtaaaacagttgcatcacaacaggagatagcaatgacgttaccgagtggacacccgaagagcagattgatcaaaaaatttaccgcactaggcccgtatattcgtgaaggtaagtgcaaagataatcgattctttttcgattgtctggctgtatgcgtcaacgtgaaaccggcaccggaagtgcgtgaattctggggctggtggatggagctggaagcgcaggaatcccgttttacctacagttaccagtttggtctgttcgataaagcaggcgactggaagagtgttccggtaaaagacactgaagtggttgaacgactggagcacaccctgcgtgagtttcacgagaagctgcgtgaactgctgacgacgctgaatctgaagctggaaccggcggatgattttcgtgacgagccggtgaagttaacggcgtgagtgaaatgtgccggatgcatcacatccggcaatattcattaaaactgatacgtcatgccaaccgcgacaatatcatcattattaatattcaatttgttatcgctatccagttggttgattttataatcaacaaacgcactcatatttttgttgaaataatacgtagcaccgacgtcgatataattgaccagatcttcatcaccgataccttcaatatctttccctttgcttaagacataacccaggcttggacgcagaccaaagtcaaactggtattgagcgaccgcttcaaagttctgtgtcttattggcaaagccgccagttattggcgtcattttgcgtgtttcagaatagaaagttgccagataaatattattggcatcgtatttcagacctgttgcccatgcttctgcacgcttgcctgtgccacggctttgcaggttctgctcgttggtgcgatcactgttggtataggccccactaatggcgaaatcgctgccgccaaagtcatatgtcaaactcgtgccgaagccatcgccgttttgctttttaacgtcgcggttttcgtttttcccttgatattgcagggttaagttcaggccatcgataacgccgaagaagtcggtgttccgatacgtcgccagaccgctggcgcgtttggtcataaagttgtcggtctgcgcgctggaatcgccaccaaattccgggaacatatcggtccaggcttccacgtcatacaacgcccccaggttacgaccataatcgaaagaacccaaatctttatatttcaacccggcaaaagcgagacgcgttttttgctgtgcagtatcactctctgctttattaccggcaaactctgcttcccaacgaccataaccagtcagttgatcgttaatttgtgtttcgcctttgaaaccaaaacggatataactctggtcgccatctttactggcgttatcactcatataatgcatggctttaactttgccatagacatccagtttattaccgtctttattatatatttctgcagcctgtacagatgcagatgccacaatgcccatcaccactaatgccagagtgctctttttcattttcattcctgattttaattaacgcgcgaatattcagcgggagagtcccgttgaaaacaggaaagtttttaacctgagattgttaaagatatattacagattaataatattcttaaaatgtggtaatttattaaatctgtaataaaagcgtaaacaactgccgctaggcttgctgatcccgcgcaacaaaacgccatgctttgctcgcagatggttggcaaccgacgacagtcctgctaaaacgttcgtttgatatcatttttcctaaaattgaatggcagagaatcatgagtgacagccagacgctggtggtaaaactcggcaccagtgtgctaacaggcggaagccgccgtctgaaccgtgcccatatcgttgaacttgttcgccagtgcgcgcagttacatgccgccgggcatcggattgttattgtgacgagcggcgcgatcgccgccggacgtgagcacctgggttacccggaactgccagcgaccatcgccagcaaacaactgctggcggcggtagggcagagtcgactgattcaactgtgggaacagctgtttagcatttatggcattcacgtcgggcaaatgctgctgacccgtgctgatatggaagaccgtgaacgcttcctgaacgcccgcgacaccctgcgagcgttgctcgataacaatatcgttccggtaatcaatgagaacgatgctgtcgctacggcagagattaaggtcggcgataacgataacctttctgcgctggcggcgattcttgcgggtgccgataaactgttgctgctgaccgatcaaaaaggtttgtataccgctgacccgcgcagcaatccgcaggcagaactgattaaagatgtttacggcattgatgacgcactgcgcgcgattgccggtgacagcgttagtggcctcggaactggcggcatgagtaccaaattgcaggccgctgacgtggcttgccgtgcgggtatcgacaccattattgccgcgggcagcaagccgggcgttattggtgatgtgatggaaggcatttccgtcggtacgctgttccatgcccaggcgactccgcttgaaaaccgtaaacgctggattttcggtgcgccgccggcgggtgaaatcacggtagatgaaggggcaactgccgccattctggaacgcggcagctccctgttgccgaaaggcattaaaagcgtgactggcaatttcagccgtggtgaagtcatccgcatttgcaacctcgaaggccgcgatatcgcccacggcgtcagtcgttacaacagcgatgcattacgccgtattgccggacaccacagccaagaaattgatgcaatactgggatatgaatacggcccggttgccgttcaccgtgatgacatgattacccgttaaggagcaggctgatgctggaacaaatgggcattgccgcgaagcaagccagctataaattagcgcaactctccagccgcgaaaaaaatcgcgtgctggaaaaaatcgccgatgaactggaagcacaaagcgaaatcatcctcaacgctaacgcccaggatgttgctgacgcgcgagccaatggccttagcgaagcgatgcttgaccgtctggcactgacgcccgcacggctgaaaggcattgccgacgatgtacgtcaggtgtgcaacctcgccgatccggtggggcaggtaatcgatggcggcgtactggacagcggcctgcgtcttgagcgtcgtcgcgtaccgctgggggttattggcgtgatttatgaagcgcgcccgaacgtgacggttgatgtcgctagcctgtgcctgaaaaccggtaatgcggtgatcctgcgcggtggcaaagaaacgtgtcgcactaacgctgcaacggtggcggtgattcaggacgccctgaaatcctgcggcttaccggcgggtgccgtgcaggcgattgataatcctgaccgtgcgctggtcagtgaaatgctgcgtatggataaatacatcgacatgctgatcccgcgtggtggcgctggtttgcataaactgtgccgtgaacagagcacaatcccggtgatcacaggtggtataggcgtatgccatatttacgttgatgaaagtgtagagatcgctgaagcattaaaagtgatcgtcaacgcgaaaactcagcgtccgagcacatgtaatacggttgaaacgttgctggtgaataaaaacatcgccgatagcttcctgcccgcattaagcaaacaaatggcggaaagcggcgtgacattacacgcagatgcagctgcactggcgcagttgcaggcaggccctgcgaaggtggttgctgttaaagccgaagagtatgacgatgagtttctgagtttagatttgaacgtcaaaatcgtcagcgatcttgacgatgccatcgcccatattcgtgaacacggcacacaacactccgatgcgatcctgacccgcgatatgcgcaacgcccagcgttttgttaacgaagtggatagctccgctgtttacgttaacgcctctacgcgttttaccgacggcggccagtttggtctgggtgcggaagtggcggtaagcacacaaaaactccacgcgcgtggcccaatggggctggaagcactgaccacttacaagtggatcggcattggtgattacaccattcgtgcgtaaataaaaccgggtgatgcaaaagtagccatttgattcacaaggccattgacgcatcgcccggttagttttaaccttgtccaccgtgattcacgttcgtgaacatgtcctttcagggccgatatagctcagttggtagagcagcgcattcgtaatgcgaaggtcgtaggttcgactcctattatcggcaccattaaaatcaaattgttacgtaagatcttatcattctcccaccaaaaaattatcttaatgtaacagctggtgtaagtaaattctatcaacgaagatcaatcttatctactgaccaaaaaggcctgatagggcttcgctcactatacatccttggctgcaggtttagttgtacaccactcctaaatttaatgtgttggcaatgtgttcaataaagctcgaacaaattagctcattatgatcggttaatacttcaacttctggttgcatgattgtttgtccgtaaaaagataacgcgcctgccgggtagtagcaggcgcattacgcaataggtaaacaagggaggaagttcagaaatgtaaatcgggaaggttgtacgcaatgttcatcgtactacgttgttacggctttgccgcaacaagccagttgcctgccgcgctcgcagaatgtctgcagcccggagataaggagattgttcctgccagctaaatcccttcctgtcgatacgaaccagctcgtatttttctaccagaaaattcacggcatcggctagggtgataccggcatcgatagtctgtatcaggaatgttcgggttaaatatcagcaaaaagcccgcatcatgaatactggatatgaagcatgagagttacctcagtgtttatataaggattcggtccccctctctggaacggtaactctcaatctgatcggttcctgcgttagttcacatcacgactcattttttcgctctcaccggcatcccatttgccacaaaatatcccgccgtgctcctcggcagcgcttcctgtccacgaatcatatccgctattttctcgccaatcataattgtcgtggcgttcaaattcccggtgataatctgcggcataatgctcgcatccaccacacgcaggccttctaacccgtgtacgcggccttcgccgtcaaccacggacatctcgtcgtaacccattttgcaggtaccgcacggatggaaggcggtttcggcgtggttacgcacgaactcatcgagctgttcatccgtctggcattcgacaccggggctgatttcgcggccacgatactgatccagcgcgggttgatgcatgatctcgcgggtgatgcgaattgcgtcgcggaactcctgccagtcctgctcgtggctcatgtagttaaacagaatcgccggatgctggtgcgggtcgcgggatttaatccgcacatgcccacggcttgggctgcgcatactgccgacgtggcactggaaaccgtgctctttcactgcattgctgccgttatagttaatcgctactggcaggaaatggtactgaatattcggccacgcaaattcctcacggctgcgaataaatccacctgcttcaaagtggttgctggcaccaacgccagtgccgccaaacagccactccgcaccgattttcggctggttccaccactgcagggcagggtagagggaaaccggttctttgcactcatattgcagatacatctccagatgatcctgaagattttcgccgacgccgggtaattcatgcaccagcggaatatcaaactccgccagcagttcagcgttgccgacgccggagcgttgcaggatctgcggactggcaatcgcgcctgcacataacagcacttctttgttggccgttgcgcgggttgggatggtgctgtcgccttccagccattcgacgcccaccgcgcgtttgccgtcaaaaatgatgtgatcggtcatagcgtgagtacgaatggtcaggttaggacggcttttggcctgatcgagatagccacgcgcggtgctggcgcgacggccctgcggcgtgacggtgcgatccatcggaccaaaaccttcctgctgataaccgttgagatcgtccgtgcgcgggtagcccgcctgcacgcccgcttcaatcatcgcttcaaacagcggattgacgccgggtttggaggtagtgacgctcaccgggccatcaccgccgtgatagtcgttttcacccatatcgcgagtctcggccttgcggtagtagggcaggcagtcgaggtagctccagttctccagaccgggttcttgcgcccagttatcgagatccagcgcattgccacggatgtagcacatgccgttgatcaggctgcttccacccagacctttaccgcgtccgcactccatgcggcggttattcataaacggttcaggttccgtttcataggcccagttgtagcgtttaccctgtagcgggaatgccagggcagcgggcatctgggtgcggaagtcaaagcgatagtccgggccgcccgcttcaagcagcagcacggaggtattcggatcttcagtcagacgggtagcgagaacgttgccggcactgccggcaccaataatgatgtagtcaaattgcaaataaacctcctggttagaatatggactggaatttagccatctcaacctggatggacttcacctgggtgtaactctggagcgtcatcacgccgttctcgcgaccaatgccggagtgtttgtagccgccaacgggcatctctgccggggattcgccccaggtgttgatccagcaaatacccgcttccagctgatgaatgacgcgatgcgcgcggttcaggtccgctgtcacgatgcccgccgccaggccgtagtcggtatcgttagcgcggcgaatgacttcgtcttcgctctcgtaggtcagaatggacatcactggcccgaagatctcttcacgcacgatggtcatatcgtcgctgcaatcggtgaacactgtcggtgcaacccatgcgccgttatcgaagccatcgcctttcagtacatcgccgccgcacagtacgcgcgcgccttcctctttgcctttggcgatatagcgcagcacgttatcgcgatgcgggaagctgaccagcgggccgaagttagtttgcggatcgaaaacgtcgcccgcgcgaatgcgctcaacgcgcgccagaattttctgctcaaatgcggctttgcatttcgccggaacgaagacgcgggtgccattggtacacacctgaccggagctgaagaagtttgccatcatggcgatatcggcggcgagatcgagatccgcatcatcgaaaacgatcagcggacttttaccgcccagttccatggtcacttctttcagggaagaggccgcgctgttagccatcacttttttgccgctggcgacaccgccggtaaaactcactttggcaatgcccggatgctcggtcagatattgcccggtctccgcgcccacgcccggcaacacgttaaatacgccgtccggcaggcccgcttcgctgtaaatttcagccagctttaacgcggtaagcggggtaacttcgctcggtttgaaaatcattgcgttgcctgccgccagcgccggggcggatttccacagggcaatctggatcgggtagttccatgcgccaatccctgccactacgcccagcggttcgcggcgggtatacacaaaggacgtttcacgcaacgggatctggctgccttccagcgccgggatcagcccggcgtagtactccagcacgtccgcaccggtaacgatatcgacggtactggtttcgctatatgcttttccggtgtcgagggtttccagttttgcgagttcgtcattgcgttcacgcagaatatcaacggcccgacgcagaatacggctgcgctccatggcggtcatgctcgcccagattttttgcccctgctgggcgcttttcacggcgcgatcgacatcctcgcgcccggcggcctgcacggtcgccagcacgttaccgttggccgggttaatggtctcgaaggtgcgaccgctggtggcggaggtataaccaccatgtatataaagctgctgttctgccattcgggacatcacgtctcctcggttaatcggtgggtagatgctgagtgataaagtggcgggtcagggaattagcgcgggttttatccagcggtttgccgctcagagccgcgcgcagccataatccatcaatcagcgcggccaggccgtagcccgcttcctgtgcctgttcgcgcggcaattcgcgacgaaactcgctcaccagattgctcagcaagcggcggctgctgacctgctgtaaacgatagagcatcggctgatgcatactgctggcccagaacgccagccaggctttcatcgccgcactgctcacctgcgtttcatcgaagtttccgccaacaatcgcctgtaatcgctgctctgcactgccctgcggaagtgcatgtaatcgattcaaaaccgcgtcacgcagctgactggtgatatcgcgcatggttgcttccagcagaccatttttgtccctgaaatagtggctgatgatccccgtagaaacgcctgcacggcgggcgatctgcgcgatcgttgcatcgtgcatgcccacttcatttattgcttccagtgtggcgtcgatcagttgtctgcgccggatgctctgcatccccaatttgggcattttcgccactccattcatcagcggtgtttatctattaaagcggttattgattggacgttcaatataaaatgtgtcttaattgttacgaatttgattttaaatagtaacaataacagtggggatactggatgacagaccttagtcacagcagggaaaaggacaaaatcaatccggtggtgttttacacctccgccggactgattttgttgttttccctgacaacgatcctgtttcgcgacttcagcgccctgtggattggccgcacgctggactgggtttctaaaaccttcggttggtactatctgctggcggcaacgctctatattgtctttgtggtctgtatcgcttgtagccgttttggtagcgtgaagctcgggccagaacaatccaaaccggaattcagcctgctgagttgggcggcgatgctgtttgctgccgggatcggtatcgacctgatgttcttctccgtagccgaaccggtaacgcagtatatgcagccgccggaaggcgcgggacagacgattgaggccgcgcgtcaggcgatggtctggacgctgtttcactacggcttaaccggctggagcatgtatgcgctgatgggcatggcgctcggatactttagctatcgttataatttgccgctcaccatccgcagcgcgctgtacccgatcttcggtaaacggattaacgggccgataggtcacagtgtggatattgcagcggtgatcggcactatcttcggtattgccactacgctcggtatcggtgtggtgcagcttaactatggcttgagcgtactgtttgatattcccgatagcatggcggcgaaagcggcactgatcgccttgagcgtgataatcgccacgatctctgtcacctccggtgtcgataagggcattcgcgtgttaagcgagcttaatgtcgcgctggcgctgggattgatcctgttcgtattgtttatgggcgacactagcttcctgcttaatgcactggtgctgaatgttggcgactatgtgaatcgctttatgggcatgacgctcaacagttttgccttcgaccgtccggttgagtggatgaataactggacgctcttcttctgggcatggtgggtggcatggagcccgtttgtcggcttgttcctggcgcgtatcagccgtgggcgtaccattcgccagttcgtgctgggcacgttgattattccgtttaccttcacgctgttatggctcagcgtgttcggcaatagcgcgctgtatgaaatcatccacggcggcgcggcatttgccgaggaagcgatggtccatccggagcgcggcttctacagcctgctggcgcagtatccggcgtttacctttagcgcctccgtcgccaccattactggcctgctgttttatgtgaccagcgcggactccggggcgctggtgctggggaatttcaccagccagcttaaagatatcaacagcgacgcccccggctggctgcgcgtcttctggagcgtggcgattggcctgctgacgctcggcatgctgatgactaacgggatatccgcgctgcaaaacaccacggtgattatggggctgccgttcagctttgtgatcttcttcgtgatggcggggttgtataaatctctgaaggtagaagattaccgccgtgaaagtgccaaccgcgataccgcaccgcgaccgctggggcttcaggatcgcctgagctggaaaaaacgtctcagccgcctgatgaattatccgggcacgcgttacactaaacagatgatggagacggtctgttacccggcaatggaagaagtggcgcaggagttgcggttgcgcggcgcgtacgtggagctaaaaagcctgccaccggaagagggacagcagttgggtcatctggatttgttggtgcatatgggcgaagagcaaaactttgtctatcagatttggccgcagcaatatagcgtgccgggctttacctaccgcgcacgcagcggtaaaagcacctactaccggctggaaaccttcctgttagaaggcagccagggcaacgacctgatggactacagcaaagagcaggtgatcaccgatattcttgaccagtacgagcggcaccttaactttattcatctccatcgtgaagcgccgggccatagcgtgatgttcccggacgcgtgattgttattgcataaaaccgcgccatgtctgcatatggcgctgtttctcctacctcttgatacgttatatctatacggttaagcccttagtatctattgatgattaccagacaacagataataaaaaagaaaagaactattgcagcccaaaacctacatttgggctgttgcgaatgttcaataagtttagtcttatttaatgtaaatattgctgatcatttgaaatgacgcattattcatgagaaatgtgtatcgtaaatcaactgaaattaacgcaaccatttgttatttaaggtttaattatctgtgtgtgatattttattgaatgttttaaatattgtttttattggcattgctataatattggttatcatttgctgaatggattcagtcttaatgagtgggtttttaagggacaggcatagagtaatgatacgtatgcataaccaacatctttactcattatgtcattgaatgttgacgctatgtgtttatgagggagaggtattttcagttgatctggattgttaaattcatataatgcgcctttgctcatgaatggatgccagtatgtagtgggaaattataaatattgaaatagtccaactacttctttattaccaaaaatgagtatctgaattttaatattgcattcttgcgtgattatctcctgagtttgacttgtgattacctttttaaggtatttagcgtaactgtttttgagcgagcatcagaggtaaagataatcttcttgatagtgatgtgggatgttatacgtatggcatcgctgatgtttatggttaccccttatgtgtgctcaggaatcgacaggtaatcactcatactgaacagcgataaaagataaaggtgtgttcatgaatagttgtgattttcgtgtttttctgcaagagttcggtacaacggttcatttgagtttgcctggtagcgtatccgagaaagaacgactgctactcaagctgctgatgcagggaatgtctgtaacagaaataagtcagtacagaaatcgcagtgcaaagacaattagtcatcaaaagaaacagctctttgagaaactggggattcagagcgatattactttctggcgcgatattttctttcagtacaatccggagatcatatccgccacggggagtaatagtcacagatatattaatgataatcactatcaccatatcgtcacgcctgaagccatcagtctggcgttggaaaaccacgaattcaaaccgtggatccaaccggttttctgcgcgcagactggcgtactgacgggctgtgaggtgcttgtccgctgggaacatccacaaacgggaattatcccaccggatcagtttattcctctggcggagagttccggtcttattgtcataatgacccgccaactgatgaaacagactgcggatattctgatgccggtaaaacatttgctgccggacaatttccatattggcatcaacgtcagcgcgggttgttttttggcagcgggatttgaaaaagagtgtctgaacctggttaataaattaggtaacgataaaatcaagctggttctcgagctaacggaacgtaaccctattccggtaacgccagaagccagagcgatatttgacagccttcatcagcacaacattacctttgcgctggatgactttggtacgggttatgcgacctatcgttacttgcaggcgttcccggtcgattttattaagatcgataagagttttgtgcaaatggcgagtgtcgacgaaatctccggtcatattgtggacaatattgtcgaactagcgcgtaagcctggtctgagtatcgtggcggaaggggtagaaacccaggagcaggcggatttaatgatcggtaaaggcgttcactttttgcagggctatttgtactctccgccagtaccgggtaataaatttatctctgaatgggtaatgaaagcaggtggttgatgtaaaccgctattcacagcgcatcgggaggttggcagcgattaattctcccgatgcagtaaatcctgatagatccccgttaatatgccatttggcgcaaattgttttttaatccactgcgtcacctgacccgtagcagaatgctgagtcgccagtaacatgcggctatcctggcgcggattatggatttgtcgggtaaccagcagggattgcgtcatcgcctcacggaccatgtaatccggcaaaaaaccaattccttcacctaaaatctggcactgacatttggtgttgaaatctggcaccagaatactctcctgcccgtgcagcaaccagcccacttttttattaatcgtatgcgcggtgtcctccaccataatattagggtagagacgcagttggctttcggcgatgggttccggcacaaaggctaacgggtgatccggggcgatagcaaaagcccagcgaatcgcgccaatttcagtgtaatcaataccgccgccgtccagtagtgtatcgggtgcgccgatggcgatattggcctgattattaataatcgcatcccagacgccgttatacacttcggtggtgacggtaatctggcaggtaggaaactgctttttcagcacctgtaacaagcgtgcggtgtgtttgggcgtataaagcagctgattaatacaaatgcgcacacgcgcttctatgccctggctaatagtatcgattctgcgtttgatggcataaaaatcattcagcaggtcggtagctttgcggaaaaaataacgcccggactccgttaactcaatgctgcgggtactgcgagtgaacagcaccacatccagccccgtctccatacgcttaatggtgtagctaatggcggaagtggttaaacccaactcttctgcggctttactgaagctgccaaaacgcgcagcggtagtaaatgccaacagattctcttcggtaaaaatactgttcattaaaccattctcgccattatctactatgaatttctccagctatgactgtagaggtatcggttaaagatagataatcatttttgaataacttttaatacccgtcgcgtttagtcgtcgcttcgcttaatttttgtccaccatattcactaattacccccacgcagttacccgccagaaaacccagtaacgtcaccgtccagttcatcccgctggcaaaaaacagcgtcatgccgagaaagccaccgggaataaaggacagtaaccagaaacgcccttgccagaccactaccgcgctgaagggtacggtagtaattacgctcgcccagaacgcggacagtccacttacagaggccagccaaccagcagtcagcgcggcgaaaaacgcccacaccatcccggaataattaaccgccagacttctgataaacccgcttttaccgccgcctgcggcataaaaactgcaaaaggcgacgaagccaatggttcctaataattcccatccttgagagagcccgacatgactagacactaactgccaaagccctgcacaaataccgacggtgacacccgttgccgtgagtccgttcatcttgttcccctctggttagacatggacgaaagctactcttacatgtgcagactatagagaaataaaacctgattgagtgaaagggtatcgggtcaaagaaacaaatattgcactaccgcacactgcgaaaagattgttgaatattattcaacaaaaaggcgagatacggcgaattaaatttaagcgggttcttttatcagattatcgttgctattctcaattcatcgaaaacagccacaaaaaccaggggaatgtgaatgagtataaaaaatctacctgccgactatttattggctgcacaacagggtgatatcgataaagtaaaaacctgccttgcgctgggtgtcgatattaatacctgcgatcgtcaggggaaaacggcaattacgctggcaagtttatatcagcaatatgcttgcgttcaggcattaattgatgccggagcggatattaataagcaagattatacctgtttaaatccttttttaattagctgtctgaacgatgatttaacgctactacgaattattttaccggctaaacccgatcttaattgcgtaacccgttttggcggtgtcggcctgacgcctgcctgtgaaaaaggccatttaagtattgtaaaagagcttttggcgcatacggagattaacgttaaccagaccaaccatgtaggctggacgccgctactggaagcgattgtgcttaatgatggtggtattaaacagcaggcgattgtgcagttattgctggaacacggtgccagcccgcatctgaccgataaatatggcaaaacgccactggaactggcgcgggaacggggctttgaagagattgcgcagttactgattgccgcaggtgcataaaccgggaggcttgctatcaacacaccagaaagacggtgtgtgtgggcgctaactgcggatgcggattttctggcgcagcgggggcaaggacaggttgaacaggtctttgccagagcggtaaatatcgcactcccggctcgccagcagttgctgacgctgctttgtgaagagtacgacaatgcgccaaacagttgtcggttggcactcactcactttgatgatctgttccggcatggtgataaggttcagtttgacgatcaaggtattacggttggtcaacatcttcatatagagatgagtcgttgtcggcgttggctgtccccaaccttgcaaatgaccgctgtgaattttcaccttatcgcctggctacagtggcacgacattattcatcagcacctgggggaaaatgaaaccctgtttaattatcgcggcgataatccgttttatcaggcgttaaataaagaattacatattaaacgacgggcagttattcaggccgtaaacgataaacaaaatatcgccagtgcggtcgccagtatgatggggttagggattggccttacgccaagtgccgacgattatttaacaggtctggcgcttattttatttattcccgggcatccggcggaaaaatacaaagaggaattttatctcggtctgcaacgcggcaaaaataataccacattattaagtgccataacgctggaagccgcattacaacaacgctgccgggaaaatattcatcgttttattcacaacattatttatgacatccctgggaacgcaactcaggcaatagaaaaaattaaacatattggctccagttccggctgcgacatgctgtatggcatggccgatggttgtgcgctgagccaaacctacggagggaattatgtcagttaattaaccaaacctacggagggaattatgagtgttaaaatagtcattaaaccgaatacctattttgattctgtcagcctgatgtctatctccacgcgtgcaaataaactcgacggcgtcgagcaggcatttgtggcgatggcgaccgaaatgaataaaggcgtgctgaagaatttaggactgctgacgccggagctggagcaggcgaaaaacggcgacctgatgattgtcatcaatggtaaaagcggtgcggacaacgagcagttactggtggagattgaagaactgttcaacaccaaagcgcaaagcggcagccacgaggcgcgttacgccactattggcagcgccaaaaagcatatcccggaaagtaacctggcggtgattagcgtcaacggtctgtttgccgctcgcgaagcgcgtcaggcgctgcaaaacgatctcaacgtgatgctgttttccgataacgtcagtgttgaagatgaactggcgctcaagcaactggcccacgaaaaagggctgctgatgatggggccagactgtggcacggcgattatcaacggcgcggcgctctgttttggtaacgccgtgcgtcgcggcaacatcggtattgttggcgcatccggcaccggcagtcaggagttgagcgtccgcattcatgaatttggcggcggcgttagccaactgattggcaccggcgggcgcgacctgagcgagaaaatcggcggcctgatgatgctcgacgccatcgggatgctggaaaacgatccgcaaactgaaatcattgcgcttatctccaaaccgcctgcgcctgcggtggcccgcaaagtgctggaacgtgcgcgcgcctgccgcaagccggtggtcgtctgcttcctcgatcgtggcgaaacgccagtggatgagcaggggctacagtttgcccgcggcaccaaagaggcagcgctaaaagcggtgatgctctccggcgtgaaacaggaaaatctcgacctgcatacgcttaaccagccgttgattgcggatgtgcgtgcgcgtctgcaaccgcagcagaaatacattcgtggcctgttctgcggcggcacgctgtgcgacgaaaccatgttcgcggtgatggaaaaacatggcgatgtctacagcaacattcagcccgatccggaattccgcctgaaagatatcaaccgcagcatcaaacacaccttcctcgactttggcgatgacgacttcaccaatggcaagccgcacccgatgattgaccccaccaaccgcatcagtcgcttgatcgaagaggcgcgcgatccagaagtggcggtgatcgtgatggattttgtgctcggatttggaagccatgaagatccggtcggctccaccatcgagacgatcaaagaagcgaaagcgatcgccgctgccgaaggacgcgagttgatcattctcgcctatgtgctgggtaccgatcttgatacgccaagcttagaacaacaaagccagatgctgcttgatgccggagtgattctggcgagcagcagcaccaataccggattgctggcgcgtgaatttatctgcaaaggggaggaagcctgatgagccagagtctgtttagccaaccattgaacgttattaacgtcggcatcgccatgtttagcgatgacctgaaaaagcagcatgtagaagtgactcaactcgactggacgccgccggggcagggcaatatgcaggtggtgcaggcgctggataacattgccgatagcccgctggcggacaaaatcgccgccgctaaccagcaggcgctggagcgtattatccagagccatccggtgctgattggttttgatcaggcgattaacgtggtgccgggcatgacggcgaaaaccattcttcacgccgggccgccgatcacctgggaaaaaatgtgcggcgcgatgaaaggcgcggtcaccggagcgctggtgttcgaaggactggcgaaagatctcgacgaggcggctgaactggcggcttccggggagatcaccttcagcccgtgtcacgagcacgactgcgtgggaagcatggcgggtgttaccagcgccagcatgtttatgcacatcgtaaaaaacaaaacctacggcaacatcgcttataccaacatgagcgagcagatggcgaagattttgcgtatgggcgctaacgaccagagcgtgattgaccgcctgaactggatgcgtgatgtgcagggaccaatactgcgcgacgcgatgaaaattatcggcgaaatcgatctgcgcttaatgctggcgcaggcgctgcatatgggcgatgagtgccataaccgcaataacgccgggacgacactgctgattcaggcgctgacgccggggattattcaggcgggttattccgtcgagcaacagcgcgaagtgtttgagtttgtcgccagcagcgactacttctccggcccgacgtggatggcgatgtgtaaagcggcgatggatgcggcgcatggcatcgaatacagcaccgtggtcaccaccatggcgcgtaacggcgtcgagttcggcctgcgggtcagcggcctgccggggcaatggtttaccggcccggcgcagcaggtgatcggcccgatgtttgccggttataagccggaagatagcgggctggatatcggcgacagcgccatcaccgaaacctacggtattggcggatttgctatggcgaccgcgcccgctatcgtcgcgctggtgggcggcacggtggaagaagctattgatttctcccgtcagatgcgcgaaatcaccctcggtgaaaaccccaacgtcaccattccgctgctcggttttatgggcgtgccgagcgcaatcgacatcacccgcgtgggtagcagcggcattctgccggtgatcaacaccgccatcgcccataaagatgcgggcgtcggcatgattggcgcgggcattgtgcatccaccttttgcctgcttcgagaaagccattcttggctggtgcgaacgttacggcgtctgacctacatgttcatgccggatgcggcgtgaacgccttatccggcctacgaatggcgcaagaatctgtaggcctgataagcgtagcgcatcaggcatttgtcaccattgccggatgcggcgtgaacgccttatccggcctacgaatggcgcaagaatctgtaggcctgataagcgtagcgcatcaggcatttgccaccactgccggatgcggcgtggacgccttatccggcctacgagtggcgcgagaatctgtaggcctgataagcgtagcgcatcaggcatttgtcaccattgccggatgcggcgtgaacgccttatccggcctacgagtggcgcgagaattgtaagcctgataagcgtagcgcatcaggcagtctggcgttggtcataaccccatcaccctctgtagcggacataacaacatgaaagagcttgtggtcgttgccattggtggcaacagcattatcaaagataacgccagccagagcattgagcatcaggcggaggcggtgaaagccgtcgccgatacggtgctggaaatgctggcttccgattacgacattgtgctgacccacggcaacgggccgcaggtcgggctggatttacgccgtgcggagattgcccacaagcgcgaagggctgcccttaacgccgctggcgaactgtgtggcagatacgcagggcggcatcggctatctgatccaacaggcgctgaataaccggctggcgcgtcacggcgagaagaaagccgtcaccgtggtgactcaggtggaagtggataaaaacgatccaggttttgcccatcccaccaagcccatcggcgcattctttagtgacagccagcgtgacgaattacaaaaggcaaaccctgactggtgttttgttgaagatgccgggcggggctatcgccgcgtggtcgccagcccggaaccgaaacgtattgtcgaagcacctgccattaaagcgctgatccaacaaggttttgtcgtaattggcgcgggcggcggtggaattccggtagtgcgtactgacgcgggagattaccaaagcgtggacgcggttatcgacaaagatctctctaccgcgctgctggcccgtgaaattcacgccgacattcttgtgatcaccactggcgtcgaaaaagtgtgtattcactttggcaaaccgcagcagcaggcgctcgatcgggtggatattgccaccatgacccgctatatgcaggaagggcatttcccgcccggcagcatgttgccaaaaatcatcgccagcctgacatttttagaacaaggcggcaaagaagtgattatcaccacgccggaatgcctgcctgcggcgctgcgcggcgaaacgggcactcatattattaaaacgtaaggacgtaagatgaaagaaagcaatagccgccgtgaatttctgagccagagcggtaagatggtcaccgccgccgcgctgtttggtacctctgtgccgctcgcccatgcggcggtagctggcaccctaaactgcgaagcgaacaacaccatgaaaatcactgacccgcattactatctcgataacgtgctgctggaaaccggttttgactacgaaaatggcgtggcggtgcagacccgcacggcgcgccagaccgtggagattcaggacggcaaaattgtcgccctgcgcgagaacaagctgcatccggacgccacgctgccgcactatgacgctggcggtaagctgatgctgcccaccacccgcgacatgcatattcatctcgacaaaaccttttacggcgggccgtggcgcagcctcaatcgtccggcaggcaccaccatccaggacatgatcaaactcgagcagaaaatgctgccggaactgcaaccgtacactcaggagcgggcagaaaaactgattgatttattgcagagcaaaggcaccaccattgcccgcagccactgcaatatcgaaccggtttccggcctgaaaaatctgcaaaatttgcaggcggtgctggcgcgacgtcaggcgggctttgagtgtgaaatcgtcgccttcccgcagcacggtttgctgctgagcaaatctgaacctttaatgcgtgaagcgatgcaggcgggggcgcattacgtcggcggcctggacccgaccagtgttgatggcgcgatggaaaaatccctcgacaccatgttccagattgcgctggactacgacaaaggcgtcgatattcacctgcacgaaaccactccggcaggcgtggcagccatcaattatatggttgaaacggtagagaaaacgccacagctgaagggcaagctgaccatcagtcacgcctttgcgctggcaacgctcaacgagcaacaggtagatgaactggcgaaccggatggtggtgcaacaaatttctatcgccagcacggtgccgattggcacgctgcatatgccgctcaaacagttgcacgacaaaggcgtaaaagtgatgactggcactgacagcgttatcgaccactggagcccttatggtctgggcgacatgctggaaaaagccaatctgtacgcgcagctctatattcgtcctaacgaacagaacctctcccgcagcctgtttttagccactggcgatgtattgccgctgaatgaaaaaggcgagcgtgtatggccaaaagcgcaggatgacgccagctttgtgctggtggacgcctcctgttccgccgaggcggtggcgcgtatcagcccgagaaccgcaacgttccataaagggcaactggtgtgggggagtgtggcaggttgatgcgcatttgaaacgcctgcaacggtgaatagtaagagatttaagccccagggagtggggcaatctgaatatgagtgtgtcggcagaaatggacattatctttgaggaatatgcccttattgacgttgtgtagataactatttgtctacgtgaaaagatcatcagttttgccgattttagtcttttacagatagcaaatatcacacttacaggcgctcgccttatggggaacgttgctgctctgtttcattcaggctcgcggcatgttggggctggatcgggtggtttaaatattggctatattcaatggacgcgttttgccgcgatgacatatcaggcgttgccaaatacacatagctaatcaggagtaaacacaatgaagatcaaagctgttggtgcatattccgctaaacaaccacttgaaccgatggatatcacccggcgtgaaccgggaccgaatgatgtcaaaatcgaaatcgcttactgtggcgtttgccattccgatctccaccaggtccgttccgagtgggcggggacggtttacccctgcgtgccgggtcatgaaattgtggggcgtgtggtagccgttggtgatcaggtagaaaaatatgcgccgggcgatctggtcggtgtcggctgcattgtcgacagttgtaaacattgcgaagagtgtgaagacgggttggaaaactactgtgatcacatgaccggcacctataacagcccgacgccggacgaaccgggccatactctgggcggctacagtcaacagatcgtcgttcatgagcgatatgttctgcgtattcgtcacccgcaagagcagctggcggcggtggctcctttgttgtgtgcagggatcaccacgtatagcccgctacgtcactggcaggccgggccgggtaaaaaagtgggcgtggtcggcatcggcggtctgggacatatggggattaagctggcccacgcgatgggggcacatgtggtggcatttaccacttctgaggcaaaacgcgaagcggcaaaagccctgggggccgatgaagttgttaacagtcgcaatgccgatgagatggcggctcatctgaagagtttcgatttcattttgaatacagtagctgcgccacataatctcgacgattttaccaccttgctgaagcgtgatggcaccatgacgctggttggtgcgcctgcgacaccgcataaaagcccggaagttttcaacctgatcatgaaacgccgtgcgatagccggttctatgattggcggcattccagaaactcaggagatgctcgatttttgcgccgaacatggcatcgtggctgatatagagatgattcgggccgatcaaattaatgaagcctatgagcgaatgctgcgcggtgatgtgaaatatcgttttgttatcgataatcgcacactaacagactgaaaaaattaataaataccctgtggtttaacatattaacttcgctctccacttaactttttagttaaggagagcgaaataatatcaaagtagcagtaaaacctataacgtaaatttaaattgttaaattaacgccctccagtacacaatacttcacacgttagttatgagcgatttctgatagtgcctggtttaatcagagctttattatctgcgacgtttatttttatttaagagagatcgcgatgataagtttaaaagctccgcacaataatttgatgccatatacgcaacaaagcatacttaatacggttaaaaacaatcagttaccagaggatatcaaaagctccctggtttcctgtgtcgatatattcaaggttttgattaaacaatattatgattatccttatgattgtcgtgatgatttagtcgatgacgacaaactcattcatctcatggctgccgtacgagactgtgagtggagtgacgataacgcactcaccataaatgtgcagtttaatgatttccctggattttatgactggatggattaccctgatcacccggttaagtttgtttttcacatacttgaaaatcaaaaagggacagtttgggtatatgaccaggatgatgcgtttcttgatattaaagcaaacgtgcaggctggacgctttaccgggcttaagaaattagtgcagtttatcgatagtgtgcgaacagattgcaaatgtattcttcttgaataccatatgcctttgctgagaattttccctaaagggaaagagtgtatgcatgtggaaaaatggcttcgcgaaatgagctctattccggagacagacgcgcccattaagcaggcgcttgcgcatggattattattacacttaaaaaatatctaccctgtttttcctgaaagtctggtgatgttattgctctctgttctggacgtaaaaacatacagagatgatgcgcgattaaatgaatggatatctaatagagtgcaggaattaggtgacagatattatcctgtaaataagcacgttaaaatccgctacactctttaattcagaaagggttccacctgcaagttgttattccacctgagagtgaatcgcaatgcaggtaatcatttcatctgtatatctgtatgccaactggcattccatctcttttttcgccgatattttgttgtgatcggcgacacttcgcttaaaaaagcaccagtagtggtttcgcagccatgcggtgtataaaaaatgatctcatgcagatgttttgtgaatgtgttggttgacattcatatgaaaaaaatcataattccatcatgtttgtgtggggtcttttctgtatcttacgcatcgcactcaagcctgacagaaaatatgctgtaaggctcatatcaaaaaccgccattagctcatcaggaagagcagacgacaaccaggattgttgtatggtacggggttcgaggcctcgatggcggtccaacttttcaaaactcttctgaatcagatccccttattaagttccctgcaaagtggaacattgccattgtttggctatagtggatggggcagaccaatgaaaaaagcccacacaggggagagtgggctgaaatgggaagctaaagacagtagtaaacttatcggaaataaggaccacgcattacgggggctaagtagcccgatggccgtgattcggcaaatcaggttgattacgtaaagagtaaattatctgctcaccgctgcgtcaccccttcgtaaatcaggcgtagcgcgaatacaccaataattgcaccaataacccgactggcaacgcgttgcatacgcccataagcacgacgcacagcgggcaaagaaaacgcctgactaagaaaaactcgccagataatacttgcgagcacaatccccgcccaggccattaaacgtgcccatgttggtgtttctgcatttaatgttacactgaaaatactgataaaaaataaaacggtttgcgggttagagagatcggtaattaatccgcggcgaaaaaagacataccagggggcgctaatcggttgttgtagtgtgctcatttgcggtgtactctggcggcgcatgctgcaccacgcaaaccataagagataagcgccgccgacgattctgataaggctaaaaatctcctcacactgcgtaattagcgttgcaagaccaaacaaacccaacccggaataaaatgcatcgcccagcgccacgcccagcccggtcagcacccctgcgcgtcgaccggaagccaggctggtttgtactaccacaaagagattggctcccggattaaaaaaagtaatcacgaacagtcctacggtcaggtaaacggcatgcaaaggatccatagtgatttcatccataaataagtgaactaactgcatcatatttctaccaaaaataatcgggtgcgagagagatcacaaagtgtcttatttccggttactggcgtttatgccctgactgaactaattattaatcaacccaataatgtgggtgggtgatagtgtgataacaactctggagccgtaatatgaaaataatctctaaaatgttagtcggtgcgttagcgttagccgttaccaatgtctatgccgctgaattgatgaccaaagcggaatttgaaaaagttgaaagccagtatgaaaaaataggtgatattagtaccagcaatgaaatgagcactgcagatgcaaaagaagatttgatcaaaaaagcggatgaaaaaggggctgatgtgttggtactgacctccggtcaaactgacaataagatccacggcacggcaaatatttataagaagaagtaattctgaatcctatgtaaacatctccgatgcgtaagtttatcggtgatcatctattgaaatttatgccggataaagcgttcgcgctgcattcggcagttcagcttttcagccgccgccagaacgtcgtccggctgatgcctaaataattcgccgctgctgttttatcgccattaaatttctccagtgcctgttgtggtgtcagtaagcgtggagcgggagttttcgcgctctcgcgcgccagttccggcagtagcagttgcataaactgcggcgttaaatccggcgtcggttccacacttaaaaacagcgccagtcgttccatcatattgcgcagttcacgaatattgcctggccagtcgtagtgcagcagcacagtttcacttgcctgtaacccctggcgtaatgcagcagaaaatggggcggagagcgccgccagagacactttcaaaaagctttccgccagcggaagaatatccgccacccgctcgcgcagtggtggcaattgcagacgcaaaatactcagccgataaaacagatcacggcgaaaacgtccttgctgcatatcttcttccagattgcagtgagtggcgctaatgacccgtacatctaccggaacaggctgatgcccgccgacgcgggtgacctctttttcttccagcacccgcagcagccgggtctgcaaaggtagcggcatttcgccaatctcatccagaaacagcgtaccgccgtgggcaatttcgaacagcccggcgcgacctccgcgtcggctgccggtaaacgccccttcctcatagccaaacagttctgcttccagcaggctttcggcaatcgccccgcagttgacggcaacaaacggatggctctttttgccctgtcgcgcatcgtggcgggcaaaatattcccgatgaatcgcctgggccgccagctctttgcccgtccccgtttccccctcaatcaacaccgccgcactggagcgggcatacagcaaaatagtctgccgtacttgttccatctgtggactttgaccgagcatatcgcccagcacgtaacgagtacgcagggcgttgcgggtggcatcgtgagtgttatggcgtaagctcatgcgcgtcatatccagcgcatcgctgaacgcctggcgcacggtggcggcggaatagataaaaattccggtcattccggcttcttctgccaaatcggtaatcagccctgcgccgaccaccgcttcggtgccgttagcttttagctcgttaatctgcccgcgtgcgtcttcctcggtaatgtagctacgttggtcgaggcgcaaattaaaggttttttgaaacgccaccagcgctggaatggtttcctgataggtgacaacgccgatagaagaggtgagttttccggcttttgccagtgcctgtaacacatcgtagccgctcggtttaatcaaaataactggcacactcaggcggcttttcaggtacgcgccgttagagccagccgcgatgatggcgtcacagcgttcgtttgccagtttcttgcggatgtaggtcactgctttttcaaagccaagctgaataggggtaatgttcgccaggtgatcaaactcgaggctgatatcgcgaaacagctcgaacaggcgcgttacagataccgtccagataaccggtttgtcgtcattaagccgtggtggatgtgccatagcgcaccgcaaagttaagaaaccgaatattgggtttagtcttgtttcataattgttgcaatgaaacgcggtgaaacattgcctgaaacgttaactgaaacgcatatttgcggattagttcatgactttatctctaacaaattgaaattaaacatttaattttattaaggcaattgtggcacaccccttgctttgtctttatcaacgcaaataacaagttgataacaaaggatgggctatgtctctacactctccaggtaaagcgtttcgcgctgcactgactaaagaaaatccattgcagattgttggcaccatcaacgctaatcatgcgctgttggcgcagcgtgccggatatcaggcaatttatctttctggcggtggcgtggcggcaggtagcctggggctgcccgatctcggtatttctacccttgatgatgtgctgaccgacattcgccgtatcaccgacgtttgtagcctgccgctgctggtggatgcggatatcggttttggttctagcgcctttaacgtggcgcgcaccgtgaaaagcatgattaaagccggtgcggcaggattgcatattgaagatcaggttggtgcgaaacgctgcggtcatcgtccgaataaagcgatcgtcagcaaagaagagatggtggatcggatccgcgcggcggtggatgcgaaaaccgatcctgattttgtgatcatggcgcgcaccgatgctctggcggtagaggggctggatgcggcgatcgagcgtgcgcaggcctatgttgaagcgggtgccgagatgttgttcccggaggcgattaccgaactcgccatgtaccgccagtttgccgatgcggtgcaggtgccgatcctcgccaacatcaccgaatttggtgccacgccgctgtttaccaccgacgaattacgcagcgcccatgtcgcaatggcgctgtacccacttagtgcgttccgcgccatgaaccgcgccgctgaacatgtctacaacgtcctgcgccaggaaggcacgcagaaaagcgtcatcgacaccatgcagacccgcaacgagctgtacgaaagcatcaactactaccagtacgaagagaagctcgacaacctgtttgcccgtagccaggtgaaataaaaaacgcccgttgattgtattcgacagccgatgcctgatgcgtcgctgacgcgacttatcaggcctacgaggtgcactgaactgtaggtcggataagacggatggcgtcgcatccgacaaccgatgcctgatgcgccgctgacgtgacttatcaggcctacggggtgcactgaactgtaggtcggataagacgcatagcgtcgcatccgacaaccgatgcctgatgcgccgctgacgcgacttatcaggcctacggggtgcactgaactgtaggtcggataagacgcatagcgtcgcatccgacaaccgatgcctgatgcgccgctgacgcgacttatcaggcctacggggtgaactgaactgtaggtcggataagacgcatagcgtcgcatccgacaacaatctcgaccctacaaatgataacaatgacgaggacaacatgagcgacacaacgatcctgcaaaacagtacccatgtcattaaaccgaaaaaatctgtggcactttctggcgttccggcgggcaatacggcgctctgcaccgtgggtaaaagtggcaatgacctgcattaccgcggctacgatattcttgatctggcgaaacattgcgaatttgaagaagtggcgcatctgctgatccacggcaaactgccgacccgtgacgaactcgccgcttacaaaacgaaactgaaagccctgcgcggtttaccggctaacgtgcgtaccgtgctggaagccttaccggcggcgagccacccgatggatgttatgcgcaccggtgtttccgcgctcggctgcacgctgccagaaaaagaggggcataccgtctctggcgcgcgggatattgccgacaaactgctggcgagccttagcagcattctcctttattggtatcactacagccacaacggcgaacgcatccaaccggaaaccgatgacgactccatcggcggtcacttcctgcatctgctgcacggcgaaaagccaagccaaagctgggaaaaggcgatgcatatcagcctggtgctgtacgccgaacacgagtttaacgcctccacctttaccagtcgggtgattgcgggcaccggctctgatatgtattccgcgattattggcgcgattggcgcactgcgcgggccaaaacacggcggggcgaatgaagtgagcctggagatccagcaacgctacgaaacgccggacgaagccgaagcagatatccgcaagcgcgtggaaaacaaagaagtggtcattggttttggtcatccggtttacaccatcgctgacccgcgccaccaggtgattaaacgtgtggcgaagcagctcagccaggaaggcggcagcctgaagatgtacaacatcgccgatcgcctggaaacggtgatgtgggagagcaaaaagatgttccccaatctcgactggttctctgctgtttcctacaacatgatgggcgttcccaccgagatgttcacaccactgtttgttatcgcccgcgtcaccggctgggcggcgcacattatcgaacaacgtcaggacaacaaaattatccgtccttccgccaattatgttggaccggaagaccgcccgtttgtcgcgctggataagcgccagtaaacctctacgaataacaataaggaaacgtacccaatgagtgctcaaatcaacaacatccgcccggaatttgatcgtgaaatcgttgatatcgtcgattacgtcatgaactacgaaatcagctctaaagtggcctacgacaccgcacattactgcctgctcgacacgctcggctgcggtctggaagctctcgaatacccggcctgtaaaaaactgctggggccaattgttcccggcaccgtcgtacccaacggcgtgcgcgtccccggaactcagttccagctcgaccccgtccaggcggcatttaacatcggcgcgatgatccgctggctcgatttcaacgatacctggctggcggcggagtggggccatccttccgacaacctcggcggcattctggcaacggcggactggcttagccgcaacgcggtcgccagcggcaaagcgccgttgaccatgaaacaggtgctgaccgcaatgatcaaagcccatgaaattcagggctgcatcgcgctggaaaactcctttaaccgcgtcggcctcgaccacgttctgttagtgaaagtggcttccaccgccgtggtcgccgaaatgctcggcctgacccgcgaggaaattctcaacgccgttagcctggcgtgggtggacggtcagagcctgcgcacctatcgccatgcgccgaacaccggcacgcgtaaatcctgggcggcgggcgatgccacttcccgcgcggtacgtctggcactgatggcgaaaacgggcgaaatgggttacccgagtgccctgactgcgccggtgtggggcttctacgacgtctcctttaaaggtgaaagcttccgcttccagcgcccgtacggttcctacgttatggaaaatgtgctgttcaaaatctccttcccggcggagttccactcccagacggcagttgaagcagcgatgacgctctatgaacagatgcaggcagcaggcaaaacggcggcggatatcgaaaaagtgaccattcgcacccacgaagcctgtattcgcatcatcgacaaaaaagggccgctcaataacccggcagaccgcgatcactgcattcagtacatggtggcgatcccgctgctattcgggcgcttaacggcggcagattacgaggacaacgttgcgcaagataaacgcattgacgccctgcgcgagaagatcaattgctttgaagatccggcatttaccgctgactaccacgacccggaaaaacgcgccatcgccaatgccattacccttgagttcaccgacggcacacgatttgaagaagtggtggtggagtaccccattggtcatgctcgccgccgtcaggatggtattccgaaactggtcgataaattcaaaatcaatctcgcgcgccagttcccgactcgccaacagcagcgcattctggaggtttctctcgacagagctcgcctggaacagatgccggtcaatgagtatctcgacctgtacgtcatttaagtaaacggcggtaaggcgtaagttcaacaggagagcattatgtcttttagcgaattttatcagcgtagcattaacgaaccggagcagttctgggccgagcaggcccggcgtattgactggcagacgccctttacgcaaacgctcgatcacagcaatccgccgtttgcccgttggttttgtgaaggccgaaccaacttgtgccacaacgccatcgaccgctggctggagaaacagccagaggcgctggcgctgattgccgtctctagcgaaacagaagaagagcgcacctttacctttcgtcagctgcatgacgaagtgaacgcggtggccagtatgttgcgtagtttgggtgtgcagcgcggcgatcgggtgctggtgtatatgccgatgattgccgaagcgcatattactctgctggcctgcgcgcgcattggcgctattcacagcgtggtgtttggtggatttgccagccacagcgtggcggcgcgaattgatgacgctaaaccggtgctgattgtcagcgctgatgccggagcgcgcggtggcaaaatcattccctataaaaaattgctcgacgatgcgataagtcaggcgcagcaccagccacgccatgttttgctggtggatcgcgggctggcgaaaatggcgcgcgtcagcgggcgggatgtcgatttcgcgagcttgcgccatcaacacatcggcgcgcgggtaccggtggcgtggctggaatccaacgaaacctcctgcattctctacacttccggcacgaccggcaaacctaaaggcgtgcagcgtgacgtcggcggatatgcggtggcgctggcgaccagcatggacaccatttttggcggcaaagcgggcagcgtgttcttttgcgcaagcgatatcggctgggtggtggggcatagctatatcgtttacgcgccgctgctggcggggatggcgactatcgtttacgaaggattgccgacctggccggactgcggcgtgtggtggacaatcgtcgagaaatatcaggttagccggatgttcagtgcgccgaccgccattcgcgtgctgaaaaaattccctaccgctgaaattcgcaaacacgatctcagcagcctggaagtgctctatctggctggagaaccgctggacgagccgaccgccagttgggtgagcaatacgctggatgtgccggtcatcgacaactactggcagaccgaatccggctggccgattatggcgattgctcgcggtctggacgacaggccgacgcgtctgggaagccccggtgtgccgatgtatggctataacgtgcagttgcttaatgaagtcaccggcgaaccgtgtggcgtcaacgagaaagggatgctggtggtggaagggccgctgccgccggggtgtattcagaccatctggggcgacgacggccgctttgtgaagacttactggagcctgttttcccgcccggtgtacgccacctttgactggggcatccgtgacgctgacggttatcactttattctcgggcgcactgacgatgtaattaacgttgccgggcatcggctggggacgcgcgagattgaagagagtatctccagccatccgggcgttgccgaagtggcggtggttggggtgaaagatgcgctgaaagggcaggtggcggtggcgtttgtcattccgaaagagagcgacagtctggaagatcgtgatgtggcgcacagccaagagaaggcgattatggcgctggtggacagccagattggcaactttggccgcccggcgcacgtctggtttgtcagccaattgccaaaaacgcgatccggaaaaatgctgcgccgcacgatccaggcgatttgcgaaggacgcgatcctggagatctgacgaccattgatgatcctgcgagcttggatcagatccgccaggcgatggaagagtaagttattgtcggatgcgtcgcgcggtgcatccggcactgtgtgccgatgcctgatgcgacgctgacgcgttttatcatgcctacggacctgaaccgtaggtcggataaggcgctcgcgtcgcatccgacaccatgctcagatgcctgatgcgacgctgacgcgtcttatcaggcctacccactgtttttacaccgataatttttcccccacctttttgcactcattcatataaaaaatatatttccccacgaaaacgattgctttttatcttcagatgaatagaatgcggcggattttttgggtttcaaacagcaaaaagggggaatttcgtgagccaagataacaactttagccaggggccagtcccgcagagcgcgcggaaaggggtattggcattgacgttcgtcatgctgggattaaccttcttttccgccagtatgtggaccggcggcactctcggaaccggtcttagctatcatgatttcttcctcgcagttctcatcggtaatcttctcctcggtatttacactagttttctcggttacattggcgcaaaaaccggcctgaccactcatcttcttgctcgcttcagctttggtgttaaaggcagttggctgcctagtctgctactgggcggaactcaggttggctggtttggcgtcggtgtggcgatgtttgccattccggtgggtaaggcaaccgggctggatattaatttgctgattgccgtttccggtttactgatgaccgtcaccgtcttttttggcattagcgcgctgacggttcttagcgtgattgcggttccggctatcgcctgcctgggcggttattccgtgtggctggctgttaacggcatgggcggcctggacgcattaaaagcggtcgttcccgcacaaccgttagatttcaatgtcgcgctggcgctggttgtggggagttttatcagtgcgggtacgctcaccgctgactttgtccggtttggtcgcaatgccaaactggcggtgctggtggcgatggtggcctttttcctcggcaacagcttgatgtttattttcggtgcagcgggcgctgcggcactgggcatggcggatatctctgatgtgatgattgctcagggcctgctgctgcctgcgattgtggtgctggggctgaatatctggaccaccaacgataacgcactctatgcgagcggtttaggtttcgccaacattaccgggatgagcagcaaaacccttagcgtaatcaacggtattatcggtacggtctgcgcattatggctgtataacaattttgtcggctggttgaccttccttagcgcagctattcctccagtgggtggcgtgatcatcgccgactatctgatgaaccgtcgccgctatgagcactttgcgaccacgcgtatgatgagtgtcaattgggtggcgattctggcggtcgccttggggattgctgcaggccactggttaccgggaattgttccggtcaacgcggtattaggtggcgcgctgagctatctgatccttaacccgattttgaatcgtaaaacgacagcagcaatgacgcatgtggaggctaacagtgtcgaataactaagacgcatgtggaggctaacagtgagcaataacgctttacaaacaattattaacgcccggttaccaggcgaagaggggctgtggcagattcatctgcaggacggaaaaatcagcgccattgatgcgcaatccggcgtgatgcccataactgaaaacagcctggatgccgaacaaggtttagttataccgccgtttgtggagccacatattcacctggacaccacgcaaaccgccggacaaccgaactggaatcagtccggcacgctgtttgaaggcattgaacgctgggccgagcgcaaagcgttattaacccatgacgatgtgaaacaacgcgcatggcaaacgctgaaatggcagattgccaacggcattcagcatgtgcgtacccatgtcgatgttagcgatgcaacgctaactgcgctgaaagcaatgctggaagtgaagcaggaagtcgcgccgtggattgatctgcaaatcgtcgccttccctcaggaagggattttgagctatcccaacggtgaagcgttgctggaagaggcgttacgcttaggggcagatgtagtgggggcgattccgcattttgaatttacccgtgaatacggcgtggagagcctgcataaaaccttcgccctggcgcaaaaatacgaccgtctcatcgacgttcactgtgatgagatcgatgacgagcagagccgctttgtcgaaaccgttgctgccctggcgcaccatgaaggcatgggcgcgcgagtcaccgccagccacaccacggcaatgcactcctataacggggcgtataccagtcgcctgttccgcttgctgaaaatgtccggtattaactttgtcgccaacccgctggtcaatattcatctgcaaggacgtttcgatacgtatccaaaacgtcgcggcatcacgcgcgttaaagagatgctggagtccggcattaacgtctgctttggtcacgatgatgtcttcgatccgtggtatccgctgggaacggcgaatatgctgcaagtgctgcatatggggctgcatgtttgccagttgatgggctacgggcagattaacgatggcctgaatttaatcacccaccacagcgcaaggacgttgaatttgcaggattacggcattgccgccggaaacagcgccaacctgattatcctgccggctgaaaatgggtttgatgcgctgcgccgtcaggttccggtacgttatagcgtacgtggcggcaaggtgattgccagcacacaaccggcacaaaccaccgtatatctggagcagccagaagccatcgattacaaacgttgaacgactgggttacagcgagcttagtttatgccggatgcggcgtgaacgccttatccggcctacgtagagcactgaactcgtaggcctgataagcgtagcgcatcaggcaattccagccgctgatctgtgtcagcggctaccgtgattcattcccgccaacaaccgcgcattcctccaacgccatgtgcaaaaatgccttcgcagcggctgtctgccagctgtagtttatgccggatgcggcgtgaacgccttatccggcctacgtagagcactgaactcgtaggcctgataagcgtagcgcatcaggcaattccagccgcagacctgtgtcagcggttaccgactttcatttccgccaacaaccgcgcatttatccaacgccatgtgcaaaaatgccttcgcggcggctgtctgccagctatttttccgccgcaacaaaaccgccgttctctccagtagtggcggggcaagagaaatagctttaagcccgtcatgttgtgtggcaatcgctgctggtaacaatgtggaaagggaagtgcggcgaatcagctccagaaccgcgctaatactgttcgcctcaatgaccacctgtggatgtagccccgctttctcgcagtagtggtcaatttgctctctggtggcaaattccgcgctgagcaggaccagtttttcatcatgcaagcgactcaacgccacctgttcatggacggccagcggatgatgttgcgccacgactaacgctaaactttctgtcagtaaaggaattgcctccagctccgggctatgcacaggcgcgaaggcaatcccaacgtccaactcgtcgcggcaaagcatatcctcgattttctcctggctcatttcctgtagctggagcgtgatgctgggatagcgcgcatagaaatccgccattaaggggccgataaagtagctcgtaaaggtgggggtgacggcgatacgcaggcttcctcgcgtcagatcggcaacatcatgaatcgcccgtttacccgcccccagttcctgtaacgcccggctggcgtactgtcgccagacttctcctgcatcagtgagacgaatcgttcgcccgctacggtcaaacagcggcacgcctaaactctcctctaactggcgaatctgctgggaaagcgcaggttgggagacgtgcaacgcactggcggcacgggtgaagctgccatgttcagccacggcaagaaaataattgatatgtcgagagagcattcgcaacctataagtaaatccaatggaactcatcataaatgagacttttaccttatgacaatcggcgagtagtctgcctctcattccagagacagacagaggttaacggtgaaagagattattgatggattccttaaattccagcgcgaggcatttccgaagcgggaagccttgtttaaacagctggcgacacagcaaagcccgcgcacactttttatctcctgctccgacagccgtctggtccctgagctggtgacgcaacgtgagcctggcgatctgttcgttattcgcaacgcgggcaatatcgtcccttcctacgggccggaacccggtggcgtttctgctagcgtggagtatgccgtcgctgcgcttcgggtatctgacattgtgatttgtggtcattccaactgtggcgcgatgaccgccattgccagctgtcagtgcatggaccatatgcctgccgtctcccactggctgcgttatgccgatagtgcccgcgtcgttaatgaggcgcgcccgcattccgatttaccgagtaaagctgcggcgatggtacgtgaaaacgtcattgctcagttggctaatttgcaaactcatccaagcgtgcgcctggcgctcgaagaggggcggatcgccctgcacggctgggtctacgacattgaaagcggcagcatcgcagcttttgacggcgcaacccgccagtttgtgccactggccgctaatcctcgcgtttgtgccataccgctacgccaaccgaccgcagcgtaaccttatttttaaaccatcaggagttccaccatgattcagagtcaaattaaccgcaatattcgtcttgatcttgccgatgccattttgctcagcaaagctaaaaaagatctcagttttgccgagattgccgacggcaccggtctggcagaagcctttgtaaccgcggctttgctgggtcagcaggcgcttcctgccgacgccgcccgcctggtcggggcgaagctggatctcgacgaagactccattctactgttgcagatgattccactgcgtggctgcattgatgaccgtattccaactgacccaacgatgtatcgtttctatgaaatgttgcaggtgtacggtacaaccctgaaagcgttggttcatgagaaatttggcgatggcattattagcgcgattaacttcaaactcgacgttaagaaagtggcggacccggaaggtggcgaacgtgcggtcatcaccttagatggtaaacatctgccgaccaaaccgttctgacagccatgcgcaaccatcaaaagacgttcacgatgctgctggtactggtgctgattggtcttaatatgcgaccactgctcacctccgtcgggccactgctaccgcaattgcgccaggcgagcggaatgagctttagcgtggctgccctgttgaccgctctgccggtggttaccatgggcgggctggcgctggccggaagctggcttcatcagcatgtcagcgaacgtcgcagtgtcgccatcagtctgttgctgattgccgtcggtgcattgatgcgtgagctttacccgcaaagtgcgctgctgcttagcagcgcactgcttggtggggtggggatcggcatcattcaggcggtgatgcctagcgtgattaaacggcggtttcagcagcgcacgccactggtgatggggctgtggtccgcggctctgatgggcggcggtgggcttggtgccgccataacgccctggttagttcaacatagcgaaacctggtatcaaacactcgcctggtgggcgctgcctgccgttgttgcgctctttgcctggtggtggcaaagcgcccgcgaggtcgcctcttcccacaagacaacaaccactccggttcgcgtggtattcactccccgcgcgtggacgctgggtgtttacttcggtctgattaacggcggttacgccagcctgattgcctggttacccgctttctatattgagattggtgccagcgcgcagtacagcggttccttactggcattgatgacgcttgggcaagccgcaggagctttgctgatgcctgctatggctcgccatcaggatcggcgcaaactgttaatgctggcgctggtgttacaactggtggggttctgcggctttatctggctgccgatgcaattgccggtattgtgggcgatggtgtgtgggttaggtctgggcggcgcgtttccgctctgtttgctgctggcgctcgatcactctgtgcaaccggctattgctggcaagctggtggcgtttatgcagggaatcggttttatcatcgccgggcttgccccgtggttttctggcgtgctgcgtagtatcagcggcaattacctgatggactgggcatttcatgcgctgtgcgtcgttgggctgatgatcataaccctgcgttttgcaccagtacgttttccgcagctgtgggtcaaagaggcatgatgcgacgcttgttcctgcgctttgttcatgccggatgcggctaatgtagatcgctgaacttgtaggcctgataagcgcagcgtatcaggcaatttttataatttaaacactgctttcaactttataatctttgaaataatagtgcttatcccggtcgtttatttcgcgaataacccgacaaggaacgccagccgccacgacgtttggtggaatgtcttttgtgacgatactacccgcgccaataacagaattatccccgatggtgacgcctggattaataaccacatgacttccgatccagacgttattgccaatcgttatcggaaaagagtacatctcgccgttttttctcaattcatggtgtacagggtgtcccgtaacggaaagagtaacgttgggtgcaatcagtacgttatcaccgattgttaccgtgtagtcatcgacaatggttaaattgaaatttgcataaaaattgcggcctatatggatgttggaaccgtaagagaaatagacaggcggttctacccaggcgttttcccctaccgtggcaaacatttctttaatcaggctttctcttttttcaacttcacttggatggctgtgattaaactcatacattaacgttttcccacgaagtcttttttccggtaagccttcgcacatatcggtaaatagcttgcctgctcttattctttcggtcattggcatgttcaatgcgatcactccgttatgatatgttggtcggataaggcgctcgcgccgcatccgacattgattgcttaagcgacttcattcacctgacgacgcagcagggaaagcgggccggggccgctaagcgtgaacacggaaattaaggtgaagcccagcgccaccagacccagcaccagataagcgccctggaaaccgatgctttcatacatattgcccgccagtacagacataaaaatcatcgccagttgcttaaagaagcagaaacagaccagataaatcgtcgcactaaaacgcacttcaaactggctggtaatatatttaaagcagcccaccagcaggaacggtacttcaaacatatgcagcgttttcagaataaccacttccagcgcactggtggcgaagctactgccaataatacgtacagacataatagtgccagccagcagcagggcgtttttcccaccgatgcgattaatgatcagtggcgcaaagaacataatgctggcgttaagtaattcgcccattgtcgttacgtagccaaatacccgcgtaccctgttcaccggtagcaaagaagctagtaaagaaattagcaaactgttggtcaaaaacatcgtaggtgcaggaaacgccaataacatacagactcaaaaaccacagttttggctgtctgaacagttccagtgccagcttaaggctaaatgcgctatggttggcacctaccgcattggcaaccgtggcagaagagggcgcatccgttttggcgaaaaagagtaaaacggcgaggatgagtgcacagccagagcccagccagaaaacaaactgattattgatggtgaacatgatgccgacaatgctggcacacagcgcccagccaacacagccaaacatccgcgcgcgaccaaattcgaaattactgcgacggctgactttctcaataaatgcctctactgctggcgcaccggcgttaaaacaaaagcctagataaataccaccaacaatgcttcctactaaaatgttgtattgtaacagtggcccgaagataaaaataaagaacggcgcaaacatcactaacatgccggtaataatccacagcaggtatttgcgcagcccgagtttgtcagaaagcagaccaaacagcggttggaataataggctgaacagagaaatagcggcaaaaataatacccgtatcacttttgctgatatggttgatgtcatgtagccaaatcgggaaaaacgggaagtaggctcccatgataaaaaagtaaaagaaaaagaataaaccgaacatccaaaagtttgtgttttttaaatagtacataatggatttccttacgcgaaatacgggcagacatggcctgcccggttattattatttttgacaccagaccaactggtaatggtagcgaccggcgctcagctggaattccgcgcttacactcgggctccaggagtcgtcgccaccaatccccatatggaaaccgtcgatattcagccatgtgccttcttccgcgtgcagcagatggcgatggctggtttccatcagttgctgttgactgtagcggctgatgttgaactggaagtcgccgcgccactggtgtgggccataattcaattcgcgcgtcccgcagcgcagaccgttttcgctcgggaagacgtacggggtatacatgtcactcaatggcagatcccagcggtcaaaacaggcggcagtaaggcggtcgggatagttttcttgcggccctaatccgagccagtttacccgctctgctacctgcgccagctggcagttcaggccaatccgcgccggatgcggtgtatcgctcgccacttcaacatcaacggtaatcgccatttgaccactaccatcaatccggtaggttttccggctgataaataaggttttcccctgatgctgccacgcgtgagcggtcgtaatcagcaccgcatcagcaagtgtatctgccgtgcactgcaacaacgctgcttcggcctggtaatggcccgccgccttccagcgttcgacccaggcgttagggtcaatgcgggtcgcttcacttacgccaatgtcgttatccagcggtgcacgggtgaactgatcgcgcagcggcgtcagcagttgttttttatcgccaatccacatctgactaagaaagccactctggcggttaaattgccaacgcttattacccagctcgatgcaaaaatccatttcgctggtggtcagatgcgggatggcgtgggacgcggcggggagcgtcacactgaggttttccgccagacgccactgctgccaggcgctgatgtgcccggcttcactccatgcggtcgcgttcggttgcactacgcgtactgtgagccagagttgcccggcgctctccggctgcggtagttcaggcagttcaatcaactgtttaccttgtggagcgacatccagaggcacttcaccgcttgccagcggcttaccatccagcgccaccatccagtgcaggagctcgttatcgctatgacggaacaggtattcgctggtcacttcgatggtttgcccggataaacggaactggaaaaactgctgctggtgttttgcttccgtcagcgctggatgcggcgtgcggtcggcaaagaccagaccgttcatacagaactggcgatcgttcggcgtatcgccaaaatcaccgccgtaagcgctccacgggttgccgttttcatcatatttaatcaggctctgatccacccagtcccagacgaagccgccctgtaaacggggatactgacgaaacgcctgccagtatttagcgaaaccgccaagactgttacccatcgcgtgggcgtattcgcaaaggatcagcgggcgcgtctctccaggtaggctaagccattttttgatggaccatttcggcacagccgggaagggctggtcttcatccacgcgcgcgtacatcgggcaaataatatcggtggccgtggtgtcggctccgccgccttcatactgcaccgggcgggaaggatcgacagatttgatccagcgatacagcgcgtcgtgattagcgccgtggccactttcattccccaggctccagatgatcacactcgggtgattacgatcgcgctgcaccattcgcgttacgcgttcgctcatcgccggtagccagcgcggatcatcggtcagacgattcattggcaccatgccgtgggtttcaatattggcttcatccaccacatacaggccgtagcggtcgcacagcgtgtaccacagcggatggttcggataatggctacagcgcacggcgttaaagttgttctgcttcatcagcaggatatcctgcaccatcgtctgctcatccatgacctgaccatgcagaggatgatgctcgtgacggttaacgcctcgaatcagcaacggcttgccgttcagcagcagcagaccattttcaatccgcacctcgcggaaaccgacatcgcaggcttctgcttcaatcagcgtgccgtcggcggtgtgcagttcaaccaccgcacgatagagattcgggatttcggcgctccacagtttcgggttttcgacgttcagacgtagtgtgacgcgatcggcataaccaccacgctcatcgataatttcaccgccgaaaggcgcggtgccgctggcgacctgcgtttcaccctgccataaagaaactgttacccgtaggtagtcacgcaactcgccgcacatctgaacttcagcctccagtacagcgcggctgaaatcatcattaaagcgagtggcaacatggaaatcgctgatttgtgtagtcggtttatgcagcaagctgacgtcacggaaaatgccgctcatccgccacatatcctgatcttccagataactgccgtcactccagcgcagcaccatcaccgcgaggcggttttctccggcgcgtaaaaatgcgctcaggtcaaattcagacggcaaacgactgtcctggccgtaaccgacccagcgcccgttgcaccacagatgaaacgcgctgttaacgccatcaaaaataattcgcgtctggccttcctgtagccagctttcatcaacattaaatgtgaggctgtaacaacccgtcggattctccgtgggaacaaacggcggattgaccgtaatgggataggtcacgttggtgtagatgggcgcatcgtaaccgtgcatctgccagttactggggacgacgacagtatcggcctcaggaagatcgcactccagccagctttccggcaccgcttctggtgccggaaaccaggcaaagcgccattcgccattcaggctgcgcaactgttgggaagggcgatcggtgcgggcctcttcgctattacgccagctggcgaaagggggatgtgctgcaaggcgattaagttgggtaacgccagggttttcccagtcacgacgttgtaaaacgacggccagactatccgtaatcatggtcatagctgtttcctgtgtgaaattgttatccgctcacaattccacacaacatacgagccggaagcataaagtgtaaagcctggggtgcctaatgagtgagctaactcacattaattgcgttgcgctcactgcccgctttccagtcgggaaacctgtcgtgccagctgcattaaactatcggccaacgcgcggggagaggcggtttgcgtattgggcgccagggtggtttttcttttcaccagactgacgggcaacagctgattgcccttcaccgcctggccctgagagagttgcagcaagcggtccacgctggtttgccccagcaggcgaaaatcctgtttgatggtggttaacggcgggatataacaactgctgtcttcggtatcgtcgtatcccactacgctgatatccgcaccaacgcgcagcccggactcggtaatggcgcgcattgcgcccagcgccatctgatcgttggcaaccagcatcgcagtgggaacgatgccctcattcagcatttgcatggtttgttgaaaaccggacatggcactccagtcgccttcccgttccgctatcggctgaatttgattgcgagtgagatatttatgccagccagccagacgcagacgcgcgctgacagaacttaatgggcccgctaacagcgcgatttgctggtgacccaatgcgaccagatgctccacgcccagtcgcgtaccgtcttcatgggagaaaataatactgttgatgggtgtctggtcagagacatcaagaaataacgccggaacattagtgcaggcagcttccacagcaatggcatcctggtcatccagcggatagttaatgatcagcccactgacgcgttgcgcgagaagattgtgcaccgccgctttacaggcttcgacgccgcttcgttctaccatgctcaccaccacgctggcacccagttgatcggcgcgagatttaatcgccgcgacaatttggctcggcgcgtgcagggccagactggaggtggcaacgccaatcagcaagctctgtttgcccgccagttgttgtgccacgcggttgggaatgtaattcagctccgccatcgccgcttccactttttcccgcgttttcgcagaaacgtggctggcctggttcaccacgcgggaaacggtctgataagagacaccggcatactctgcgacatcgtataacgttactggtttcacattcaccaccctgaattgactctcttccgggcgctatcatgccataccgcgaaaggttttgcgccattcgatggtgtcaacgtaaatgcatgccgcttcgccttccggccaccagaatagcctggctttcaaccccttcttcgatctgttttgctacccgttgtagcgccggaagatgcttttccgctgcctgttcaatggtcattgcgctcgccatatacaccagattcagacagccaatcacccgttgttcactgcgcagcggtacggcgatagaggcgatcttctcctcctgatcccagccgcggtagttctgtccgtaaccctctttgcgcgcgcgcgccagaatggcttccagctttaacggttcccgtgccagttgatagtcatcaccggggcgggaggctaacatttcgattaattccttgcggtcttgttccgggcaaaaggccagccaggtcaggccgctggcggttttcagaagcggcaaacgtcgcccgaccattgcccggtgaaaggataagcggctgaaacggtgagtggtttcgcgtaccaccattgcatcaacatccagcgtggacacatctgtcggccataccacttcgcgcaacagatcgcccagcagtggggccgccagtgcagaaatccactgttcgtcacgaaatccttcgcttaattgccgcactttgatggtcagtcgaaaactatcatcggaggggctacggcggacatatccctcttcctgcagcgtctccagcagtcgccgcacagtggtgcgatgcaggccgctgagttccgccagcagcccgacgctggcaccgccatcaagtttatttaacatatttaataacattagaccgcgggttaagccgcgcacggttttgtattccgtctgctcattgttctgcatattaatactcatttctatagttaaaacaacgtggtgcacctggtgcacattcgggcatgttttgattgtagcgctaaacacccttcctatactgagcgcacaataaaaaatcatttacatgtttttaacaaaataagttgcgctgtactgtgcgcgcaacgacattttgtccgagtcgtgaggtactgaaatggcaatacaacaccctgacatccagcctgctgttaaccatagcgttcaggtggcgatcgctggtgccggcccggttgggctgatgatggcgaactatctcggccagatgggcattgacgtgctggtggtggagaaactcgataagttgatcgactacccgcgtgcgattggtattgatgacgaggcgctgcgcaccatgcagagcgtcggcctggtcgatgatgttctgccgcacactacgccgtggcacgcgatgcgttttctcaccccgaaaggccgctgttttgctgatattcagccaatgaccgatgaatttggctggccgcgccgtaacgcctttattcagccgcaggtcgatgcggtgatgctggaaggggtgagccgttttccgaatgtgcgctgcttgttttcccgcgagctggaggccttcagtcagcaagatgacgaagtgaccttgcacctgaaaacggcagaagggcagcgggaaatagtcaaagcccagtggctggtagcctgtgacggtggagcaagttttgtccgtcgcactctgaatgtgccgtttgaaggtaaaactgcgccaaatcagtggattgtggtagatatcgccaacgatccgttaagtacgccgcatatctatttgtgttgcgatccggtgcgcccgtatgtttctgccgcgctgcctcatgcggtacgtcgctttgaatttatggtgatgccgggagaaaccgaagagcagctgcgtgagccgcaaaatatgcgcaagctgttaagcaaagtgctgcctaatccggacaatgttgaattgattcgccagcgtgtctacacccacaacgcgcgactggcgcaacgtttccgtattgatcgcgtactgctggcgggcgatgccgcgcacatcatgccggtatggcaggggcagggctataacagtggtatgcgcgacgcctttaacctcgcatggaaactggcgttggttatccaggggaaagcccgcgatgcgctgctcgatacctatcaacaagaacgtcgcgatcacgccaaagcgatgattgacctgtccgtgacggcgggcaacgtgctggctccgccgaaacgctggcagggtacgttacgtgacggcgtttcctggctgttgaattatctgccgccagtaaaacgctacttcctcgaaatgcgcttcaagccgatgccgcaatattacggcggtgcgctgatgcgtgagggcgaagcgaagcactctccggtcggcaagatgtttattcagccgaaagtcacgctggaaaacggcgacgtgacgctgctcgataacgcgatcggcgcgaacttcgcggtaattggctggggatgcaatccactgtgggggatgagcgacgagcaaatccagcagtggcgcgcgttgggcacacgcttcattcaggtggtgccggaagtgcaaattcataccgcacaggataaccacgacggcgtactacgcgtgggcgatacgcaaggtcgcctgcgtagctggttcgcgcaacacaatgctagcctggtggtgatgcgcccggatcgctttgttgccgccaccgccattccgcaaaccctgggcaagaccctgaataaactggcgagcgtgatgacgctgacccgccctgatgccgacgtttctgtcgaaaaggtagcctgatatgcacgcttatcttcactgtctttcccacagcccgctggtggggtatgtcgacccggcgcaagaggtgctcgatgaggtcaatggcgtgattgccagcgcccgcgagcgtattgcggcattctcccctgaactggtggtgctgtttgcgccagatcactacaacggctttttctatgacgtgatgccaccgttctgtttaggcgttggagcgacggcaattggtgatttcggcagtgcggcaggagagctgcccgtgcctgtggagctggcggaggcctgtgcgcatgccgtcatgaagagcgggatcgatcttgccgtttcttactgtatgcaggtggaccacgggttcgcccagccgctggagttcctgctcggtgggctggataaggtgccagttctgcctgtgttcatcaacggtgtcgccacgccgctgcccggtttccagcgtacccgcatgttgggtgaagccattggacgtttcaccagcactctcaataaacgcgtgctgttcctgggttccggtgggctttcccatcagccgccggtgcccgaactggcgaaagccgatgcccatatgcgcgaccgtctgttggggagcgggaaagatttacccgccagtgagcgcgaattgcgtcagcaacgggtgattagcgccgctgagaagtttgttgaggatcagagaacgctgcatccgctcaacccgatttgggataaccagttcatgactttgctggagcagggacgcatacaggaactggatgccgtcagtaacgaagagctttccgccattgccggaaagagcacacatgaaatcaaaacctgggtcgccgcttttgccgctatttctgcgtttggcaactggcgtagcgaagggcgttattaccgcccaatcccggagtggattgccggatttggcagcttaagcgccagaacagagaactgaatatgcaggagaagatgatgagttatcagccacaaaccgaagccgccaccagccgttttctgaatgtagaagaagcgggtaaaacgctgcgcatccattttaatgactgcggacaaggcgacgaaaccgttgtcctgctgcatggttccggcccgggtgctactggctgggcgaacttcagccgcaatatcgatccgctggtagaggcgggctatcgggtgatcctgctggattgtccgggttggggcaagagcgatagcgtcgttaatagtggtagccgaagcgatcttaatgcacgaatcctgaaaagcgtggtggatcaactggatatcgccaaaatccacctgctgggcaacagcatggggggccatagttctgtggcgttcacccttaaatggccggagcgcgtcggcaaactggtgctgatgggcggcggtacgggcggcatgagtttgtttacgccgatgccaaccgaaggtattaagcgactgaatcagctttatcgtcagccgactatcgaaaacctgaagctgatgatggatatcttcgtttttgataccagcgatttgaccgacgccctgtttgaagcgcgcctgaataatatgctgagccgccgcgatcacctggaaaacttcgttaagagcctggaagctaatccgaaacagttcccggattttggcccacgtctggcggaaatcaaagcgcaaaccctgattgtctgggggcgcaacgaccgctttgtgccgatggatgcgggtctgcgtctgctgtccggcattgccggttctgaactgcatatcttccgcgactgtggtcactgggcgcagtgggaacatgccgacgctttcaatcaactggtgctgaatttcctcgcacgcccttaaggaatggtcatgacgaagcatactcttgagcaactggcggcggatttacgccgcgccgcagagcagggcgaagcgattgcaccgctgcgcgatctgattggtatcgataacgctgaagcggcttacgccattcagcacataaatgtgcaacatgacgttgcgcaggggcgtcgcgtggtagggcgtaaagtgggcctgacacatccgaaagtgcaacaacaactgggcgttgatcaaccggattttgggacgttatttgccgacatgtgttatggcgataacgaaatcattcctttttcccgtgttctgcaaccccgcattgaagcggagatcgcactggtgttgaaccgcgatttgcccgcaaccgatatcaccttcgacgaattgtataacgccattgaatgggtacttccggcgctggaagtggtggggagccgcattcgcgactggagcattcagtttgtcgataccgtggcagataacgcctcctgtggggtgtatgtcatcggcggtccggcgcaacgtccggcggggttagacctgaaaaactgcgccatgaagatgacgcgtaataacgaagaggtttctagcgggcgcggcagcgaatgcctgggacatccgcttaatgcggccgtctggctggcacgcaaaatggccagtctgggtgaaccgctgcgcaccggagatatcattcttaccggggcattaggtccgatggtggcggtgaatgcgggcgatcgttttgaagcccatattgaaggcataggtagtgttgctgcgacatttagtagcgcagccccaaaaggaagtctgagttgagctaagccccaaaaggaagtctgtcatgagtaagcgtaaagtcgccattatcggttctggcaacattggtaccgatctgatgattaaaattttgcgtcacggtcagcatctggagatggcggtgatggttggcattgatcctcagtccgacggtctggcgcgcgccagacgtatgggcgtcgccaccacccatgaaggggtgatcggactgatgaacatgcctgaatttgctgatatcgacattgtatttgatgcgaccagcgccggtgctcatgtgaaaaacgatgccgctttacgcgaagcgaaaccggatattcgcttaattgacctgacgcctgctgccatcggcccttactgcgtgccggtggttaacctcgaggcgaacgtcgatcaactgaacgtcaacatggtcacctgcggcggccaggccaccattccaatggtggcggcagttagtcgcgtggcgcgtgttcattacgccgaaattatcgcttctatcgccagtaaatctgccggacctggcacgcgtgccaatatcgatgaatttacggaaaccacttcccgagccattgaagtggtgggcggcgcggcaaaagggaaggcgattattgtgcttaacccagcagagccaccgttgatgatgcgtgacacggtgtatgtattgagcgacgaagctagtcaagatgatatcgaagccagtatcaatgaaatggctgaggcggtgcaggcttacgtaccgggttatcgcctgaaacagcgcgtgcagtttgaagttatcccgcaggataaaccggtcaatttaccgggcgtggggcaattctccggactgaaaacagcggtctggctggaagtcgaaggcgcagcgcattatctgcctgcctatgcgggcaacctcgacattatgacttccagtgcgctggcgacagcggaaaaaatggcccagagtctggcgcgcaaggcaggagaagcggcatgaacggtaaaaaactttatatcagcgacgtcacattgcgtgacggtatgcacgccattcgtcatcagtatagcctggaaaacgttcgccagattgccaaagcactggacgatgcccgcgtggatagcattgaagtggcccacggcgacggtttgcaaggttccagctttaactatggtttcggcgcacatagcgaccttgaatggattgaagcggcggcggatgtggtgaagcacgccaaaatcgcgacgttgttgctgccaggaatcggcactattcacgatctgaaaaatgcctggcaggctggcgcgcgggtggttcgtgtggcaacgcactgtaccgaagctgatgtttccgcccagcatattcagtatgcccgcgagctcggaatggacaccgttggttttctgatgatgagccatatgaccacgccggagaatctcgccaagcaggcaaagctgatggaaggctacggtgcgacctgtatttatgtggtggattctggcggtgcgatgaacatgagcgatatccgtgaccgtttccgcgccctgaaagcagagctgaaaccagaaacgcaaactggcatgcacgctcaccataacctgagtcttggcgtggcgaactctatcgcggcggtggaagagggctgcgaccgaatcgacgccagcctcgcgggaatgggcgcgggcgcaggtaacgcaccgctggaagtgtttattgccgccgcggataaactgggctggcagcatgggaccgatctctatgcgttaatggatgccgccgacgacctggtgcgtccgttgcaggatcgaccggtacgagtcgatcgcgaaacgctggcgctgggatacgctggtgtttacagcagcttcctgcgtcactgtgaaacggcggcggcgcgttatggcttaagtgcggtggatattctcgttgagctgggcaaacgccggatggttggcggccaggaggatatgatcgttgacgtggcgctggatctgcgcaacaacaaataatgatgactgccgagaacgtgcattttgtatgcccatcccagcacgactgccggatgcggcgtgaacgccttatccggcctacggatggcgtgagaatttgtaggtctgataagacgcgttagcgtcgcatcaggcatctgcgcacgactgccggatgcggcgtgaacgccttatccggcctacggatggcgcgggaatttgtaggcctgataagacgcgttagcgtcgcatcaggcatctgcgcacgactgccggatgcggcgtgaacgccttatccggcctacgggtggcgcgagaatttgtaggcctgataagacgcgttagcgtcgcatcaggcatctgcgcacgactgccggatgcggcgtaaacgccttatccggcctacggatggcgcgggaatttgtaggcctgataagacgcgttagcgtcgcatcaggcatctgcacacgactgccggatgcgataaacgtcttgtccggcctacatttcgcccgtaggcagtcattaaatagttctgattacgcggctggcaatgtatcagtcgcgattcacctgcactcgcaacgaggttcatcttatgagcactcgtacccctagtagttctagttcccgcctgatgctgaccatcgggctttgttttttggtcgctctgatggaagggctggatcttcaggcggctggcattgcggcgggtggcatcgcccaggctttcgcactcgataaaatgcaaatgggctggatatttagcgccggaatactcggtttgctacccggcgcgttggttggcggaatgctggcggaccgttatggtcgcaagcgcattttgattggcagtgttgcgctgtttggtttgttcagtctggcaacggcgattgcctgggatttccccagtctggtctttgcgcggctgatgaccggtgtcgggctgggggcggcgttgccgaatcttatcgccctgacgtctgaagccgcgggtccacgttttcgtgggacggcagtgagcctgatgtattgcggtgttcccattggcgcggcgctggcggcgacactgggtttcgcgggggcaaacttagcatggcaaacggtgttttgggtaggtggtgtggtgccgttgattctggtgccgctattaatgcgctggctgccggagagcgcggttttcgctggcgaaaaacagtctgcgccaccactgcgtgccttatttgcgccagaaacggcaaccgcgacgctgctgctgtggttgtgttatttcttcactctgctggtggtctacatgttgatcaactggctaccgctacttttggtggagcaaggattccagccaagccaggcggcaggggtgatgtttgccctgcaaatgggggcggcaagcgggacgttaatgttgggcgcattgatggataagctgcgtccagtaaccatgagcctactgatttatagcggcatgttagctagcctgctggcgcttggaacggtgagcagttttaacggtatgttgctggcgggatttgtcgcggggttgtttgcgacaggtgggcaaagcgttttgtatgccctggcaccgttgttttacagtagccagatccgcgcaacaggtgtgggaacagccgtggcggtagggcgtctgggggctatgagcggtccgttactggccgggaaaatgctggcattaggcactggcacggtcggcgtaatggccgcttctgcaccgggtattcttgttgctgggttggcggtgtttattttgatgagccggagaagtcgaatacagccgtgcgccgatgcctgacgtgccttattaggcaggggcgaaagggacttcaccccaatacacctacggcgtttacaggtatactcgctaaaaattattcagcgggtttggaaacaaagatggcaaaacttaccttacaagagcagttgctcaaagcaggattagtcaccagcaaaaaagcggcgaaggtggagagaacggcgaaaaaaagccgcgttcaggcgcgtgaagctcgggcggcggtagaagaaaataaaaaggcacagcttgagcgtgataaacagcttagcgaacagcaaaaacaagcggcgttggcgaaagaatataaagctcaggtgaagcagcttattgaaatgaaccgaatcaccattgccaatggcgatattggttttaacttcactgacggcaatctgattaagaagatttttgtcgataagctcacacaggcgcagttgattaatggtcgtctggcgattgcccgcttgttggtcgataacaatagcgaaggtgaatacgccattattcccgccagcgttgccgataaaattgctcagcgcgatgccagcagtatagtgttgcacagcgcgctcagcgccgaagagcaggatgaagacgacccgtatgccgacttcaaagtgcctgatgatttgatgtggtaaacatagataagtcgtgcgcagatgcctgatgcgacgctatgcgcgtcttatcaggcctacggtttatgggcgaagtgtagaccggataaggcgttcacgccgcatccggcagtcgtgcgccatgcctgatgcgacgctttgcgcgtcttatcaggcctacggcttacgggcgaagtgtaggccggataaggcgttcacgccgcatccggcagtcgtgctattatcaacgcatattcagtttattggcgtggtaggcaatatgctcgccaataaaactggagacaaaataatagctgtgatcataaccctcgtgataacggattaacgtcttgatattcatctcctggcagatcttttcaagatttggagtccgcagctgttctgcgtaaaaatcatcactcaacccctgatcaaccatgatttccgcaacgcgttgaccttgactaataagactcaccgggtcgtaatccaaccaggcatctttattttcagcaagatatgcagcaaaggcttgctgtccccacggcacttggcttggggagacaatggggctaaacgcgctgacgctgacatattcatctgggttacgtaacgccagcaccagcgcgcccagcccgcccatagaatgaccagagatagactttttggccgttgccggaaaatgatgcatcactaaatccggcagctcgttgcggatatagtcatacattttgtaatgttcattccacggcgcttgcgtcgcgttcaggtaaaacccggcaccttgcccgagatcgtaacggtcagcatctgcgacatgactgcctcgcggactggtgtccggcgcaacaacaataatgttgtgctcagccgcgtaacgctgcatcccgcttttagtaatgaaattctgctcgttgcaggtcaggccactaagccagtacagcaccggcaatttttcattcgcggcttttggtgggagatagacgccgacattcatttcacatttcagactttgggaataatgccgatacatattttgccagccgccaaagctgacatgtttttcaatgagttccatcagtcattatctcagggttaatcccccggacggctgcccggggagagtattaagaacccccgcctgaagtggacggggtaaacctgcgggaaatcagtaacgaattacggttcgaatggatttgccttcatgcatcaggtcgaaggcgtcattaatttcatccaggctcatggtatgcgtgacaaacggttccagatcgatatcacctttcatcgcatcttcaaccatgcccggtaactgggaacgacctttcacgccgccaaacgcggaacctttccatacgcgaccagtgaccaactggaatggacgggtggagatttcctgaccggcaaccgcgaccccgatgatcacgctctgaccccagccgcggtgcgcactttccagcgccgcacgcatcacgttgacgttaccgatgcattcaaaggtatggtcgataccccatttgttgatatccaacaggacatcttttatcggtttgtcgtagtcattcgggttaatgcagtcggtagcaccgaagcgacgcgccagatcgaatttcttcgggttggtatcgatagcgataatccgacccgctttcgcctgacgcgcgccctgaaccactgccagaccaatcgcgccaagaccaaacacggcaacagaatcacctggctggactttagctgtgttgtgtaccgcgccaataccggtggtcacgccacagcccagcaggcagacgtgttcatggtttgcttctggattaatttttgccagagacacttccgcgactacggtgtattcactgaatgtagagcaccccatgtagtgataaagcggctgcccgttgtaagaaaaacgggtggtgccgtctggcatcaggcctttaccctgggtttcgcgaaccgcaacacagaggttagttttgccagaacgacagaactcacactcgccgcactccgcggtgtaaagcgggatcacatggtcgccaggtttgacgctggttacgccttcaccgacttcaaccacaacgccggccccttcgtgaccgagaaccaccgggaatacaccttccgggtcatcgccggagagggtaaatgcgtcggtatggcaaacgccggtatgggtgactttaattagcacttcaccttttttcggtggtgcaacgtcaatttcaacgatttccagcggtttaccgggagcaaatgcaacggcagcacgacttttcatctctcgctcttcctcaatatggtaatagattcagttatttaagataggcacgaaccagttcaatagtgtcgtcaacggattggctgacttcgcggctgtagcagtcatttcggtcaaacgtttcccggatatggctttcaagcacttctgccatcagcccattagccgcgccccgaacggcagcgatctgttggagtatggcacggcattcggcatcaccctccaggctccgttccagagcatcaatctgcccccgaatacgacgaactcgagtaaggacctttttcttctcttccggagtactgggcatttcgcacctcatcatctgcatgcaatatactataggggggtattctatatgtcaatgcatacccccctatagtatataacactggagaataaaatttatccggtgaatgtggtcggaaaacaaagaggaaaggggggggggctaatcggcagggaaggccgccccggatagcgggcggcagaaggaatcagaatttccaggtcagacgggctgcaagttgcagaccgttacgagatggacggtcccctcgcccccttggggagagggttagggtgagggggcgttcaccgtactttcaacaggttaactccccctttctgagaggaaacaaaattaacgcagaatcttcttctcagccaaatccagcgcaaagtagctgaaaatcagatccgcacccgcacgcttaatgctacctaagctttcgagcacgactttctcttcatctatagcacccgccagcgcggcgaacttaatcatcgcatactcaccgctcacctgatacgcgccaatcggcaattcagtacgttcacgcagctcacgcacgatgtcgaggtacgctccagcaggtttaaccatcaggcagtctgcgccctgggcttcatccagcagactttcacgaatcgcctcacgacggttcattgggttcatctgatagcttttgcggtcgccttttaatgcgcttccggcagcttcacggaacgggccataaaaggaggaggcgaacttggtgctatagctcataatcgccgtatctttaaatcccgcagcgtccagcgcctgacgaatcgcctgtacctggccgtccatcgcggcggaaggggcgatgaagtctgcacctgcagcagctgcaaccacggcttgcttgcctaaattttccagagtcgcgtcgttgtcgacgccatgctcgcacagcacaccgcagtgaccgtgagaagtgtattcacagaagcaggtgtcactcataacgatcatttctggcacggtctgcttgcagatgcggctcatacgcgccaccagtccatcttcccgccaggcatcgctgccggtttcatcggtatggtgagagatgccaaaagtcatcacggaacgaataccggcgttggcgatgcgttcaatttcgcgtgccagatgtttctctggaatgcgcatcacgcctggcatggcttcaacggctttgtagtcgtcaatttcttcttcaacaaagatcggcaacaccaggtcgttaaggctaagtgttgtctcttcaaacatagcgcgcagcgcaggagatttgcgcaggcgacgagggcgttggattaagtctgtcatggtctgcctgatgtttgtggaatcgaggggcatagtatacctgaagcagggtagggatgttttacgaaagttgtcgcgatgttgacaagaagagaatggaagagaggccaggacatctttttaatagaaacagcaataattttatattcactgaaaatatttttaatcttgaatattatcgggcgttaaaatattacattgtggttttcaatgcgttatccgcagcgtgacgctccagcgccagttcaatcaaacgtgtgatcagatcggtgtaacccagaccgctggcttgccacagcttcggatacatactgatattagtgaagccaggcagggtgttgatctcgttgatcaccacttcgttctctggggttaaaaacacgtctacacgcgccatgcctgcgcatcccaacgtttgataagcctgaacggcaatcgcccggatcttatcgttgatttctggcgcaatggctgccggaactaccactttcgcgccatcttcgtcaatgtacttggtgtcgtaggcatagaaatcgctggtgagtacgatctctccacaggtgctggcttgcggattgtcgttgcccagaactgcgcattcgatctcacgacctttgatcccttgctcaacgatcactttatgatcgaactcgaacgccagatcgacggcaattgcgtactgttcttcactggttactttgctgacaccaacagaagagccctgattagccggttttacaaacagtggtaaccccagtttagactccacttcggcaaaactaatgttgtgacgattggcgcgcgtcagggtaataaatggcgcaatgttcagcccggcatcgcgtagcagacgtttggtgacatctttgtccatacaggctgcactagccagaacatcagaacctacaaacggtaaattggcgacccgcagcattccctgcaaggaaccatcttcgcccagcgtaccgtggacaatcgggaaaatgacatccaccgtcggcaacggctgaccgttttgcgcgtcgataagctgatgctcatgtttacctggcacctgcgcaaggctggtcgcgctagggcgcaacgcaatatgggcaggatcgtctgcatttagcagataattgctggcatcgctgacgtgccattgcccttgtttatcaatgcccagcagcacaacgtcgaagcgacttttatcaatggcatcgacaatgttttttgcgctttgcagagacacttcatgttccgcacttttaccaccaaaaacgattcctacccgcagtttttccatcttaaaaacctatcccgtctaacacaaagtgcatacattaccacgacaaaacgggggattcgcggccttctgaaagattgttgcaatcttctgctgacaaagcgtgcaacgtactggtgaagaaagtgcgttatctcaaagatgtgcgcaagatcacaaaaatgatgaacgggaagctaatttattcctggcttaaatggccatgcggtgagtttttttctcttaattataagttaacgaagagaatatatttcataacttttatttataataaaggttgataattaaaagcctatattttgtgtgggtaattatttaaataagagaaacgtttcgctggtaatcaaacaaaaaatatttgcgcaaagtatttcctttgtcataaaaataatacttccagacactatgaagttgtgaaacataatgttaacttctccatactttggataaggaaatacagacatgaaaaatctcattgctgagttgttatttaagcttgcccaaaaagaagaagagagcaaagaactgtgtgcgcaggtagaagctttggagattatcgtcactgcaatgcttcgcaatatggcgcaaaatgaccaacagcggttgattgatcaggtagagggggcgctgtacgaggtaaagcccgatgccagcattcctgacgacgatacggagctgctgcgcgattacgtaaagaagttattgaagcatcctcgtcagtaaaaagttaatcttttcaacagctgtcataaagttgtcacggccgagacttatagtcgctttgtttttattttttaatgtatttgtacatggagaaaataaagtgaaacaaagcactattgcactggcactcttaccgttactgtttacccctgtgacaaaagcccggacaccagaaatgcctgttctggaaaaccgggctgctcagggcgatattactgcacccggcggtgctcgccgtttaacgggtgatcagactgccgctctgcgtgattctcttagcgataaacctgcaaaaaatattattttgctgattggcgatgggatgggggacagcgaaattactgccgcacgtaattatgccgaaggtgcgggcggcttttttaaaggtatagatgccttaccgcttaccgggcaatacactcactatgcgctgaataaaaaaaccggcaaaccggactacgtcaccgacagcgctgcaagtgcaaccgcctggagtaccggtgtcaaaacctataacggcgcgctgggcgtcgatattcacgaaaaagatcacccaacgattctggaaatggcaaaagccgcaggtctggcgaccggtaacgtttctaccgcagagttgcaggatgccacgcccgctgcgctggtggcacatgtgaccagccgcaaatgctacggtccgagcgcgaccagtgaaaaatgtccgggtaacgctctggaaaaaggcggaaaaggaagcattaccgaacagctgcttaacgctcgtgccgacgttacgcttggcggcggcgcaaaaacctttgctgaaacggcaaccgctggtgaatggcagggaaaaacgctgcgtgaacaggcacaggcgcgtggttatcagttggtgagcgatgctgccagtctgaatagcgtgacggaagcgaatcagcaaaaacccctgcttggcctgtttgctgacggcaatatgccagtgcgctggctaggaccgaaagcaacgtaccatggcaatatcgataagcccgcagtcacctgtacgccaaatccgcaacgtaatgacagtgtaccaaccctggcgcagatgaccgacaaagccattgaattgttgagtaaaaatgagaaaggctttttcctgcaagttgaaggtgcgagtatcgataaacaggatcatgctgcgaatccttgtgggcaaattggcgagacggtcgatctcgatgaagccgtacaacgggcgctggaattcgctaaaaaggagggtaacacgctggtcatagtcaccgctgatcacgcccacgccagccagattgttgcgccggataccaaagctccgggcctcacccaggcgctaaataccaaagatggcgcagtgatggtgatgagttacgggaactccgaagaggatagtcaagaacataccggcagtcagttgcgtattgcggcgtatggcccgcatgccgccaatgttgttggactgaccgaccagaccgatctcttctacaccatgaaagccgctctggggctgaaataaaaccgcgcccggcagtgaattttcgctgccgggtggtttttttgctgttagcaaccagacttaatggcagatcacgggcgcatacgctcatggttaaaacatgaagagggatggtgctatgaaaataacattactggttaccttgcttttcggtctggtttttttaaccaccgtcggcgctgccgagagaactttaaccccacaacaacagcgtatgacctcctgtaatcagcaggcgacggcgcaggcgttgaaaggggatgctcgtaagacctacatgagtgattgcctgaagaacagcaagtctgcgcctggcgaaaaaagtttgacgccacagcagcaaaagatgcgcgaatgcaataatcaagcaacacaacaatctctgaaaggtgatgatcgtaataagtttatgagtgcctgcctcaagaaagccgcctgatacctgatagtgctaacgggtgagctacgaaaatggctcacccgaaatatcatacttctgcctttagctccgtctctataatttgggaaaattgtttctgaatgttcccaaaaataatgaatgatgaaaactttttcaaaaaagcggcggcgcacggggaggaacctcctttaactcctcaaaacgaacatcagcggtccgggctgcgcttcgcccgtcgcgtcagactaccccgtgcggttggcctggctggcatgttcttaccgattgctagtacgctggttagtcacccgccgccgggctggtggtggctggtgttggtcggctgggcgttcgtctggccgcatttagcctggcagatagcgagcagggccgtcgatccgcttagccgggaaatttacaacttaaaaaccgatgcagtattagcgggaatgtgggtaggcgtaatgggcgtaaacgtgctgccttccaccgcgatgttgatgattatgtgtctgaatttgatgggggcaggcggcccccgtctgtttgtcgcgggtctggtgttgatggtggtttcctgccttgtcaccctcgagctgacgggcattaccgtgagcttcaatagtgcgccgctggaatggtggctctcccttcccattattgtcatttatcctctgctgtttggctgggtcagctaccagacggcaaccaaactggcggaacataaacgcaggttgcaggtcatgagtacccgcgacggcatgacgggcgtgtataaccgacgtcattgggaaactatgttacgcaatgaatttgataactgtcggcggcataatcgcgatgcaacgttactgattatcgatatcgaccatttcaagagcatcaacgatacctggggccatgatgtgggcgatgaagcgattgtggcgcttacccgacagttacaaattaccctgcgcggtagcgatgtgattggtcggtttggcggcgatgagtttgcagtaatcatgtccggtacgccagctgagagcgccattaccgccatgttacgggtgcatgaagggctaaatacattacgtttgccgaatacgccacaggtaactttacggattagtgtgggggttgcgccgctgaacccacaaatgagtcactatcgtgagtggttgaaaagcgcagatttggcgctttacaaagcaaagaaagccggacgtaaccgcaccgaagtggcggcctgacgtccggcgaaagtcatcaggatttgctgagtttttcacttttttccatacacttcgtcatcgcttcgatcactgcagcacggaagcctttctcttccagtacgcgtaccgcttcaatggtggtgcctcccggactgcagaccatatctttcagtgcccccggatgttctcccgtttccagcaccatttttgcggaacccattaccgcctgagcggcaaatttatacgcctgggcgcgtggcatcccgcccagcacggcggcgtcggccatcgcttcgataaacataaatacgtaggctgggctagaaccgctcacaccgaccaccgggtggatcatcggctcagcaattacttccgcttcgccaaagcagcggaaaatattcagcacatcagcggtatcttctggggttaccagcgcgtttggcgttacggaggtcatcccggcattaaccagtgcgggagtgttcggcatggcgcggataattttccggtcatggcccagcgcgcgggcaagctggtcgagcgtgacacctgcagcaatagaaacgaccagagagtctttattcaggctggaggtgatttcgctaagcactttaatcatgatgccaggtttaacggcagcaaaaatgatgtcggcgatttgcgccacttcttgcgcgctttctgcggcgttgatgccgaactggtcatgcagggcggcgactttatccggggagggggtgtatacccagatttgccctggaagcacctgaccgctggcaatcagaccgccgagaatggcttttcccatattgccgcagccaataaaaccgattttcttttccattgcctcactcctgccgtgaaattcattgttttgataatcgctggcagaagcataaacagaactatgccggaaggcaaaagcgcgacacaatagaggattacccaacaaaggatgactttatgacaatttgggtggatgccgacgcgtgtcccaatgtaattaaagagattttgtatcgcgcggcggaacgtatgcagatgccgctggtactggtagcaaaccagagtttacgcgtgccgccaagccgatttattcgtacgctgcgcgtcgcggcaggtttcgacgttgccgataacgaaattgtccggcagtgtgaagcgggcgatttggtgatcaccgcagatatacctttggctgctgaagccatcgagaaaggcgctgcggcgcttaatccgcgcggcgaacgttacacgccagcgaccattcgtgagcgcctgacgatgcgcgattttatggataccttacgtgccagtgggatccagaccggcggaccagatagccttagtcaacgtgaccgccaggcctttgccgcggagctggagaagtggtggctggaagtgcaacgtagtcgtggctaaatgtaatttattatttacacttcattcttgaatatttattggtatagtaaggggtgtattgagattttcactttaagtggaattttttctttacaatcgaaattgtactagtttgatggtatgatcgctattctcatgacaccggctttcgccgcattgcgacctattggggaaaacccacgatgacacaacctctttttctgatcgggcctcggggctgtggtaaaacaacggtcggaatggcccttgccgatagccttaaccgtcggtttgtcgataccgatcagtggttgcaaagtcagctcaatatgacggtcgcggagatcgtcgaaagggaagagtgggcgggatttcgcgccagagaaacggcggcgctggaagcggtaactgcgccatccaccgttatcgctacaggcggcggcattattctgacggaatttaatcgtcacttcatgcaaaataacgggatcgtggtttatttgtgtgcgccagtaagtgtcctggttaaccgactgcaagctgcaccggaagaagatttacggccaaccttaacgggaaaaccgctgagcgaagaagttcaggaagtgctggaagaacgcgatgcgctatatcgcgaagttgcgcatattatcatcgacgcaacaaacgaacccagccaggtgatttctgaaattcgcagcgccctggcacagacgatcaattgttgattttcgagcgcctatacttaacgttcatcccgtgaaataaggaagaacgatgccaacgaaaccgccttatcctcgtgaagcatatatagtgacgattgaaaaaggaaagccaggacagacggtaacctggtaccaactcagagccgatcatcctaaaccagacagcttgatcagtgaacatccgaccgctcaggaagcgatggatgcgaaaaaacgctatgaggaccctgacaaagagtgaccgcatcagactgctcggaagggattctgagtgccactacaagggatctgcgtcacatttttcataattcatgtttttctaataattagaatattaaacaataacaatccattactggaatcatttggaatctttacattatgccgtgcacgtctgctgctacgctttttgtcatttgtagcacaagtaagtgtcagcagtggtgcttcacacttgcccggtaattaacgacgaaagaaaagtaaggtggatgaacaatgagtgcgagcttggcgatcctgaccatcggcattgtacctatgcaggaagttttgccgctcctgacggaatacattgacgaagataatatttcccatcatagcctgctggggaagttaagtcgtgaagaagtgatggcggagtacgcgccagaagcaggcgaagacaccattctcacattattaaatgacaaccagctggcccatgttagccgtcgcaaagtggagcgtgacctgcaaggtgtggttgaagtgctcgataatcagggttatgacgtcattttattaatgagtacagcaaacattagtagtatgactgcgcgtaatacgatctttcttgagccgagccgaatattgcctccactggtttcctctattgttgaagatcatcaggtgggggttatcgttccggttgaggagatgctgcccgttcaggcgcaaaaatggcaaattttgcagaaaagcccggtatttagtttgggtaaccccattcatgatagtgaacaaaaaatcattgatgccgggaaagaattactggcaaaaggggctgatgtcatcatgctggattgtttaggatttcaccaacgtcatcgcgatttactgcaaaaacagctcgatgttcctgtcttgctgtctaacgtattgattgcacggctggctgcggaattactggtgtaattttgcgtgacagccagcgcctctggcccctatagtgaagtagatgttcaactaccaaacagggccagtttatgcttcaaagtaatgagtacttttccggcaaagtgaaaagtatcggcttttccagcagcagcactggtcgcgccagcgtgggtgttatggttgaaggcgaatacaccttcagcaccgctgagccggaagagatgacggtaatcagtggcgcgctgaatgtgttactgcctgacgcgaccgactggcaggtgtatgaagccggtagcgtgtttaatgttcccggtcacagtgagtttcatctgcaagttgccgaacccacctcttatctgtgccgctatctgtaattcctcgccttccccttgaacgggagggcatttttctgaaatatcctttctttagcccataataatatttcctttgctgcgattttttcaatttccgatatattcataatttatcaaggttgatataaatatcagtgaagatctccagatattgttgcggaactggctacgataaaagataaatcagatgatgaatggtggcgtgcattgctgcaaagtcgcaatgatcatttacgccaaacggcattgcgcaacgcacataccccggcgttgttgttaacgacattgactgagcctcaggatcggagcctggctattaataatccacagctggctgccgatgtgaaaacggcgtggttaaaagaggatccaagtttactcttatttgtcgaacaacccgatcttagcctgttacgtgatttagtgaaaaccggggcaacgcggaaaattcgcagtgaagcgcgtcaccggcttgaggaaaaacaatgacacaacgtccatggagcaagttacagcgtaaaacgcataatattgctgcgctaaaaattattgctcgccgtagcgaataattatatgcctggtgtggcttcgtacgccggataagacgcggcaggcgtcgcatccggcattaaaggaaaatcagcaattaacgttgtgcttcgccacctaatccttcaatcaggttttgaattaacgctgccagttcaccagtcatcaggatgaaatcggcatcaaaacgctgggcgaaatcttcacggtcgatatcttcgttttgatcgcgcagctcgtcgcagaacttcagacgcttgaggctaccatcgtcgcacatcacaaactgaatgcgctgctgccagtcgagcgccagtttagtcaccacttttccggcttcaatgtgattggtgatctcttcgctggtcagatcttgtttcttcgcgcggatcacgccgccatcttccagcaagcttttcagctcggcttcatcaagcagctggaagccctgtgccgcactaccggagcgaacccattcggtcagcgtcagttcaatcgggttttccatgctcaatggtacaaccggtaagctccccaggcttttacgcagtaatgccagcgtatcttccgcttttttggcactggcgcagtccaccataatcaaaccgttaaccgtgtcgatccacatcattgtctggctaaaacggctgaaagcacgcggcagcagagagtgcagcacttcgtctttcaggctatctttttcggttttcttcagcttacgcgcctgttccgcttccagtttggcgattttcgcttccagcgcctgtttaatcaccggagacgggaggattttttcttctttgcgcgcgcagataacaatttgaccattggcaacgtgcgttaacgcatcgctgtggcttcccatcggaggaacccagcccatcttcgccatgtcctggctgccgcatggggtaaatgccatgctggctagctgtttttccatctcttctgcacgcaggctaatctcgcggctaagacggtaaaccattaaatttttgaaccacagcatgataatttccacggccttgtcgttaaatttagcgggcatgataacgaattgtcggcggccttgcattgccaatccggttgtccgtctctacgctattgatattgaaaaaaataaggagagtaccgtgcgtataggtatcgatttaggcggcaccaaaactgaagtgattgcactgggcgatgcaggggagcagttgtaccgccatcgtctgcccacgccgcgtgatgattaccggcagactattgaaacgatcgccacgttggttgatatggcggagcaggcgacggggcagcgcggaacggtaggtatgggcattcctggcagtattagcccttacaccggtgtggtgaagaatgccaatagtacctggctcaacggtcagccattcgataaagacttaagcgcgaggttgcagcgggaagtgcggctggcaaatgacgctaactgtctggcggttagtgaagcagtagatggcgcggcagcgggagcgcagacggtatttgccgtgattatcggcacgggatgcggcgcgggcgtggcattcaatgggcgggcgcatatcggcggcaatggcacggcaggtgagtggggacacaatccgctaccgtggatggacgaagacgaactgcgttatcgcgaggaagtcccttgttattgcggtaaacaaggttgtattgaaacctttattagcggcacgggattcgcgatggattatcgtcgtttgagcggacatgcgctgaaaggcagtgaaattatccgcctggttgaagaaagcgatccggtagcggaactggcattgcgtcgctacgagctgcggctggcaaaaagcctggcacatgtcgtgaatattctcgatccggatgtgattgtcctggggggcgggatgagcaatgtagaccgtttatatcaaacggttgggcagttgattaaacaatttgtcttcggcggcgaatgtgaaacgccggtgcgtaaggcgaagcacggtgattccagcggcgtacgcggcgctgcgtggttatggccacaagagtaaaaaacgtaggcaattggcgcatcatgcctgatgcgacgcttgccgcgtcttatcaggcctacaaaaggtgccagaaccgtaggccggataaggcgttcacgccgcatccggcaataagtgctccgatgcctgatgcgacgcttgccgcgtcttatcaggcctgcaaaatgtgccagaaccgcgtagggcggataaggcgttcacgccgcatccggcaataagtaatgagcaccgagactataacttaccccagtggtttcgccagcaccggagtatccgccgcttgctggcgcttatagcgaccatacagcagcaagctgctcatcgcagcaaagctaagcagggcggcaggcagcgccacgtaattatatgccagccccagcgtcagcatcatacctccgcaatatgcgccgacggcgctaccgaggttaaacgctatttgcccacctgcggcacctaataactctccgcctttggcgttttgtagtaacaatatttgtagcggtgcactaagggcaaataatcccgcgcaacaaataaaagcaaaaataaggctcgttgttttcatgccgccgcagaaaaagagcatcagcagtgccagtacaattataaagtcagttactgctgcaatgcgcagtggactataacgtccactaatcctgccacttagcatatttcccagcaccatccctagcccaactaacatcataataaaggtcatcgccgtttcgctaaaaccggaaataaacatcatgtatggctttacgtagctgaaccaggcaaacacacctgcgttgccaaacatcgtggcggcgaaaattaaccacggggccgggctgcgcaaaaagtgaaattgttcgcgcagatttcctttcgcctcgtcgcgaatatctggcacccaaaaatagacgcttgccatcaccgcaatattaaaaacagcgatcaataaaaaggtgtaacgccagctaaattcctgacttaaatacgttcccagcggaatgcccagcaaattggcgactgtcatcccggaaaccatccccgccacggcggcggtgacttttccgggtttgataattttacttaacacgatcgctccgacgccaaaaaatgcgccatgcggaaagccggataccagccgaccaatggcgagcatcaggtaagagctagagagcgtgaacatggcgttgccaatgacgcacaacgccaccagaaacaacaagatatgtttgagactgtagcggctggaaaagagtgcgatgattggcgcaccgaccaccacccccagtgcataatagctgatcatatgcccggcggcaggaatgctaattcctacgttatgcgccagctccgtgagcacgcccataatgccaaattcggccatccccaaaccaaacgtgcccagagccaaagataaaatgacttttttcataccaccatcacaaccaccagaacggctaccaatcaccgtagccaataaagtgatagcttgcaggataacgaccagcaaggccaagagataattcgcccctctgtattcattatcctgctgaatagttatttcactgcaaacgtactttccagtttgctgtagcccaggccgttgatctttttcactttgatctgcaccggaatacgctctttcatcgcttctacgtggctaatcacaccgatggttttgccactggcgttcagggcatccagcgcatcaagggcggtatccagcgtttcgctatccagcgtgccaaaaccttcatcaaggaacaggctgtcaatacgtgttttatggctgaccagatcgctaagcgccagcgccagcgccagactaacgaggaaactttcgccgccggaaagggtacgggtatcgcgtaccgcatctgcctgccaggtatcaacaacctcgacttccagcgcctcgctggctttgcgctgtaacagatagcgcccgtgcagccgggtaagttgctgattagcgagatggactaaattatccagcgtcagcccctgggcaaacttgcggaatttatcgccctctttggaacctattaggctattcagatatccccagtcctcaacctgctgcgtcatttgagcaatttgctgcattaaggtttgttgttgctgacggttatctgcatcctgcttcagctgctggcgaatctcgccttgactcgtggtgttttcacgcaacttttggtgagtttgcgctaactcttgctgaatctgctccaccgtcacagtgagagccaacccgtcgtcaggtcggtgttgttgatgctgtgccagcgtttctgctgtctgagtgaccagagtttgcgcctgacggcgctggttttccagattctgcttgagctgttccagctgcgttagtgtttgttcatccattagcgccgcaaggaacgcctgctgatcgtcaaagacgctggcctgtagcgcggtgtcaaactgcgcctgggctttttgcagactttgcgccgccagaacatcctgttgctgtaacgtctgctgctggctgtgtaatgcgagacattgttcatgtacctgccgccagttttccaataccacagtttcttcgcagtgcgggagttcatcactttgcggcaacgtttccagaatcggcgtcagctgctgaatacggttttgcagcgcggttaattcgttctggcgttgctgccagctctgcgcttcttgctgacgtgtcgccaaccagctctcttcttcatcttcctgtggcaatgtcagtgcataacccgtcaatgtcgttaaaagtagttgctggcgttgttcaatttgctgttgatactggataatttgctgattatgcgcggcaatctgcccttgtaattcatgccgttggctgagtaaccgcagctggcgttcgtgctcatcttgtgcatccagccacggttgaatatcgtccagtggctgcaaggtgatattgaggctggccgtgacggcttgccattgttgagtaagtgcttgctcatcttgtcggaggctttgcgcttcgttttcatcacgctgaagctgctttgttatggcgtccagttgcccacgtagcgtcgcaccttcttcaccgagctttttaacttcgttttccagcgccagtaatcgagactgattaacgccaggctccagcgcctgatacgcctcgaccgccgggtggctggtggaaccacaaagtgggcaaggctgacccgcctgtaactgtgcacgttgagcttccagcgttttgatgcgcgcttcctgctcgcaaatggttttcacatcggcaagttgctgcgtcttttctttataacgctggcgcatttcgttaagtgcggcgttacgttgcgtctgttcttgcgtgacattctggatagcgacctgtaactgcgccagacgtttttgttggggaacaatctgtccatgcagcgcgaccaggtgctgacgcagtgggcgttgctcagcatgttgcgccagggcggtagcaacttcatcggcggttaacgtcaacgtgatcgccgcaagcgcattaagtttttgctcagcatgggttaactgttgctgccattgccgcagatgctcgcgatcgctggtttgttgggagaactgcgcacgccaacccgccggttcgttgttccactgacggaagcggtcgtgttcctgtaaccaggtattcaggctttgttgctgctgctgtaattctgcactctgcttcgccgcgtggtggcgaatgctcgcgcgaagcgccattgtgctctgtaagcgagtatttacttcttcaatctgctggcgaatatgcgccagcgccgcgctgtgttctgcgatgcgttcccagtgtggacgaagatttcgtgccggttgtgccagactaagcgccgccagttgaggttgcgctttttcttcttcggctaacgcctgttgcaaggcctgctgacggcggctggcttcttgctgcaattcgtcctgacgcgttaaccagtttaggctttgttgttcttgctgctgcgcggtaattaactgtttttcttcgtcagtaagtacctgcaaactcgctgtcaggctttgcacttgttccggcgtgagcaacgtgacgccgctggcctgcgcttgcagcttctccagctctgtgcgggcgcttttgtgctgctcaaaaaccatcgcgctgatttgcccgtagatttcagtgccggttaactcctcgagcaattccgcgcgttctttgggtttggcattcaggaaggcagcaaattgcccctggctaagcagcatgctacgggtgaagcgcccgtaatccagcccggttaacgtcgctgtcagttccagcttatctttcactttgtcggcgagaattttgccgtcggcgcagcgcgccagctctacgcgtggcacctgcaaattaccgtcgggttggttacgcgcccgattctggctccagaatgcacggtacgcttcacctttcacttcaaactccacctccgccagacattcggcggtatcgcgggtcatgagatcattttggctttgactaacgttagagagacgcggagtttcgtgatacagcgccagacaaatggcgtccagcagggtggttttccccgcacctgttgggccggtaatagcaaacagcccgttgctggcgaacggctcgcgggtgaaatcaatcttccattcgccttttaaactgttcaggtttttcaggcgcaggctgagaattttcatgcttcgtgttctccggcgagggtatgcaacgtcgtggtgaaaagatgctgcagacgttgctgctggctttcatccagttcttccagtgccagacggcgattgaacacctcttcgacgctgagttcgctgagggtttcacgctgttggctggctaacacacgctcgcgctgttcacgactccgacgtaccagcaatacttcgacaggcaaactttcggttaatgcctggattttgcgctgaatatcatgcagatactcatcagtagtgatttcgatatccagccagacaggtggctcctggcttacatcgcgccactgttccagctgtgcggtaatgctcgccagatcgcctttcagcactgccatgggttgcgttaccggtacgttcaggttttccacgctctctaatttgccgttactaaatgtcaccagatggacatatttactcttaccgcattcatcaaaactcagtggaatgggggagccgcaatagcgaacatgttccatgccgccaataatctgtgcgcggtgaatatgcccgagcgcgatgtagtcggctggtggaaagttttgtgccggaaacgcgtccagcgtgccaatataaatgtcacgcacggcgtcacttttactggcccccacggtcgttaaatgtcccgtggcgatgatgggcagaggctgatcgccgcgcagtttgcaggcatcggcatagtgttgttggtaataatcggtaatcgctgccagtaaatgctgctgtttttcaataccgttaagccccgcctggctggtaataatgtcacgcggacgtaaaaacggaatggggcacagcactgcgcctggcgtcccgtcgcgacgaggcaagatttgcggcgcatgtccggcgctggcgaccacggtagtattgaggaacgccatgatatcgcggctttcattcagcgtggcgacgctgtcatggtttcctgccagtaccaccagatgacagccagtttgctgtaaattgacaacaaaacggttgtataacgtgcgggcgtaactgggcgggctgccggtatcgaaaacatcaccggcaacaataatcgcatccacctgatgggtttgtgctgtctccagcagccagtcaagaaaagcctgatgttcagcttcgcggcttttactgtagaagttctggccgagatgccagtcactggtgtgaaggatgcgcataacggttccctggcgaaaaagcatgggcgcgattatacccaaacagatgtgccatttgcttttttctgcgccacggaaatcaataacctgaagatatgtgcgacgagcttttcataaatctgtcataaatctgacgcataatgacgtcgcattaatgatcgcaacctatttattacaacagggcaaatcatggcgagacgtattctggtcgtagaagatgaagctccaattcgcgaaatggtctgcttcgtgctcgaacaaaatggctttcagccggtcgaagcggaagattatgacagtgctgtgaatcaactgaatgaaccctggccggatttaattctcctcgactggatgttacctggcggctccggtatccagttcatcaaacacctcaagcgcgagagcatgacccgggatattccagtggtgatgttgaccgccagaggggaagaagaagatcgcgtgcgcggccttgaaaccggcgcggatgactatatcaccaagccgtttagcccgaaggagctggtggcgcgaatcaaagcggtaatgcgccgtattagcccaatggcggtggaagaggtgattgagatgcagggattaagtctcgacccgacatctcaccgagtgatggcgggcgaagagccgctggagatggggccgacagaatttaaactgctgcacttttttatgacgcatcctgagcgcgtgtacagccgcgagcagctgttaaaccacgtctggggaactaacgtgtatgtggaagaccgcacggtcgatgtccacattcgtcgcctgcgtaaagcactggagcccggcgggcatgaccgcatggtgcagaccgtgcgcggtacaggatatcgttttagtacccgcttttaacgccttgctcatcggacgcagagcagggcttatgatttcttaactggagtatcttacgtgctggaacggctgagctggaaaaggctggtgctggagctgctactttgctgcctcccggctttcatcctgggtgcattttttggttacctgccctggtttttgctggcaagcgtaacaggactgcttatctggcatttctggaatttattgcgccttagttggtggctgtgggtggatcgcagtatgaccccgccaccggggcgtggtagctgggaaccgctactatacggcttacaccagatgcagctgcgaaataaaaaacgccgccgtgaactgggcaatctgattaaacgctttcgtagcggcgcggagagcctgcccgacgcggtggtgctgaccacggaagagggcggtattttctggtgtaacggtctggcgcaacaaattcttggtttgcgctggccggaagataacgggcagaacatccttaacctactgcgttacccggagtttacgcaatatctgaaaacgcgtgatttttctcgcccgctcaatctggtgctcaacaccgggcggcatctggaaattcgcgtcatgccttatacccacaaacagttgctgatggtggcgcgtgatgtcacgcaaatgcatcaactggaaggggcgcggcgtaacttttttgccaacgtgagccatgagttacgtacgccattgaccgtgttacagggttacctggagatgatgaatgagcagccgctggaaggcgcggtacgcgaaaaagcgttgcacaccatgcgcgagcagacccagcggatggaaggactggtgaagcaattgctgacgctgagcaaaatagaagccgcaccgacgcatttgctcaatgaaaaggttgatgtgccgatgatgctgcgcgttgttgagcgcgaggctcagactctgagtcagaaaaaacagacatttacctttgagatagataacggcctcaaggtgtctggcaacgaagatcagctacgcagtgcgattagcaacctggtctataacgccgtgaatcatacgccggaaggcacgcatatcaccgtacgctggcagcgagtgccgcacggtgccgaatttagcgttgaagataacggaccgggcattgcaccggagcatattccgcgcctgaccgagcgtttttatcgcgttgataaagcgcgttcccggcaaaccggcggtagcggattagggttagcgatcgtgaaacatgctgtgaatcatcacgaaagtcgcctgaatattgagagtacagtaggaaaaggaacacgtttcagttttgttatcccggaacgtttaattgccaaaaacagcgattaatccgcctttgtcatcttttattgccataagccagtcgatgctggcttattttctttgcagtcaaaatacgggcgttagattttacaacgattggtgattttttgttcgcatgattagccatgtctttttcacggaaatagtgttttatactggttggtgatttcttatcgctatatacctctggtttttagatccctccttgctttaaaacgttataagcgtttaaattgcgcttcaggtgctgtcatactgactgcattaacgcggtaaatcgaaaaactattcttcgccgcgcctggttgggagtatttcccgctaaaattgtttaaatataccgctgtatcatccccagggattggcacaaaaatttaacgttacaacaccacatccacaggcagtatgatttatgacccatcaattaagaagccgcgatatcatcgctctgggctttatgacatttgcgttgttcgtcggcgcaggtaacattattttccctccaatggtcggcttacaggcaggcgaacacgtctggactgcggcattcggcttcctcattactgccgttggcctgccggtattaacggtagtggcgctggcaaaagttggcggcggtgttgacagcctcagcacgccaatcggtaaagtcgctggcgtactgctggcaacggtttgttacctggcggtggggccgcttttcgctacgccgcgtacagctaccgtttcctttgaagtggggattgcgccgctgacgggtgattccgcgctgccgctgtttatctacagcctggtctatttcgctatcgttattctggttagcctctatccgggcaagctgctggataccgtgggcaacttccttgcgccgctgaaaattatcgcgctggtcatcctgtctgttgccgctattgtctggccggcgggttctatcagcacggcgactgaggcttatcaaaacgctgcgttttctaacggcttcgttaacggctatctgaccatggatacgctgggcgcaatggtgtttggtatcgttattgttaacgcggcgcgttctcgtggcgttaccgaagcgcgtctgctgacccgttataccgtctgggctggcctgatggcgggtgttggtctgactctgctgtacctggcgctgttccgtctggggagtgacagcgcgagcctggtcgatcagtctgcaaacggcgctgctattctgcatgcttacgttcagcacacctttggcggcggcggtagcttcctgctggcggcgttaatcttcatcgcctgcctggtaacggcagttggcctgacctgtgcttgtgcagaattctttgcccagtacgtaccgctctcttatcgtacgctggtgtttatcctcggcggcttcagcatggtggtttctaacctcggcttaagccagctgatccagatctccgtaccggtgctgaccgctatttatccgccgtgtatcgcactggttgtattaagttttacacgcagttggtggcataatagctcccgcgtgattgctccgccgatgtttatcagcctgctttttggtattctcgacgggatcaaagcatctgcattcagcgatatcttaccgtcctgggcgcagcgtttaccgctggccgaacaaggtctggcgtggttaatgccaacagtggtgatggtggttctggccattatctgggatcgcgcggcaggtcgtcaggtgacctccagcgctcactaaatcactgaacatttgttttaaccacggggctgcgatgccccgtggttttttattgtgttgatgggttaggaattgatggaaagtaagaacaagctaaagcgtgggctaagtacccgccacatacgctttatggcactgggtagtgcaattggcaccgggctgttttacggtagcgcagacgccatcaaaatggccggtccgagcgtgttgttggcctatattatcggtggtatcgcggcgtatatcattatgcgtgcgctgggggaaatgagcgtacataacccggccgccagctctttcagccgttatgcgcaggaaaacctcggcccgctggcaggttacattaccggctggacctactgctttgaaatccttattgtcgccatcgccgatgtgaccgcttttggtatctatatgggtgtctggttcccgacggtgccgcactggatttgggtactgagcgtggtgctgatcatttgcgccgtaaacctgatgagcgtgaaggtattcggtgagctggaattctggttcagcttctttaaagtcgccaccatcatcatcatgattgtcgccggtttcggcatcatcatctgggggattggcaacggcgggcaaccgaccggtattcataacctgtggagcaacggcggcttcttcagtaacggctggcttggcatggtaatgagcttgcaaatggtgatgtttgcttacggtgggatcgaaattatcgggattaccgccggtgaagcgaaagatcctgagaaaagcataccgcgtgcgattaactccgtgccgatgcgtattctggtgttctacgtcggtacgctgttcgtcattatgtctatctacccgtggaatcaggttggcactgccggtagcccgttcgtgctgacgttccagcatatgggcattacctttgccgccagcattcttaactttgttgtgctgactgctagcctgagcgcaattaacagtgatgtatttggcgtaggccgtatgctccacggtatggcagagcagggcagcgcgccgaaaattttcagcaaaacgagccgtcgcggtattccgtgggttacggtgctggtgatgactaccgcgctgctgtttgcggtgtatctgaactacatcatgccggaaaacgtcttcctggtgatcgctagcctggcaaccttcgccacggtgtgggtgtggattatgatcctgctgagccaaattgccttccgtcgccgtttgccgccagaagaagttaaggcgctgaaatttaaagtgccgggtggggtagcaacgaccatcggcgggctgattttcctgctctttattatcgggttgattggttatcacccggatacgcgtatcagcctgtatgtcggtttcgcgtggattgttgtgctgttgattggctggatgtttaaacgccgccacgatcgtcagctggctgaaaaccagtaatccttgcgttctgtaagccggttcaggaggaaatcctgatccggctattccgaaagttatccgcccccgtcctcctcccccaaatatccttcagatgatgagtgatcctgcattaggctatggcaaggtgatcagattttcatcacaggggaattatgatgttaaatgcatggcacctgccggtgcccccatttgttaaacaaagcaaagatcaactgctcattacactgtggctgacgggcgaagacccaccgcagcgcattatgctgcgtacagaacacgataacgaagaaatgagtgtaccgatgcataagcagcgcagtcagccgcagcctggcgtcaccgcatggcgtgcggcgattgatctctccagcggacaaccccggcggcgttacagtttcaaactgctgtggcacgatcgccagcgttggtttacaccgcagggcttcagccgaatgccgccggcacgactggagcagtttgccgtcgatgtaccggatatcggcccacaatgggctgcggatcagattttttatcagatcttccctgatcgttttgcgcgtagtcttcctcgtgaagctgaacaggatcatgtctattaccatcatgcagccggacaagagatcatcttgcgtgactgggatgaaccggtcacggcgcaggcgggcggaagtacgttctatggcggcgatctggacgggataagcgaaaaactgccgtatctgaaaaagcttggcgtgacagcgctgtatctcaatccggtgtttaaagctcccagcgtacataaatacgataccgaggattatcgccatgtcgatccgcagtttggcggtgatggggcgttgctgcgtttgcgacacaatacgcagcagctgggaatgcggctggtgctggacggcgtgtttaaccacagtggcgattcccatgcctggtttgacaggcataatcgtggcacgggtggtgcttgtcacaaccccgaaagcccctggcgcgactggtacagctttagtgatgatggcacggcgctcgactggcttggctatgccagcttgccgaagctggattatcagagcgaaagtctggtgaatgaaatttatcgcggggaagacagtattgtccgccactggctgaaagcgccgtggaatatggacggctggcggctggatgtggtgcatatgctgggggaggcgggtggggcgcgcaataatatgcagcacgttgccgggatcaccgaagcggcgaaagaaacccagccggaagcgtatattgtcggcgaacattttggcgatgcacggcaatggttacaggccgatgtggaagatgccgccatgaactatcgtggcttcacattcccgttgtggggatttcttgccaataccgatatctcttacgatccgcagcaaattgatgcccaaacctgtatggcctggatggataattaccgcgcagggctttctcatcaacaacaattacgtatgtttaatcagctcgacagccacgatactgcgcgatttaaaacgctgctcggtcgggatattgcgcgcctgccgctggcggtggtctggctgttcacctggcctggtgtaccgtgcatttattacggtgatgaagtaggactggatggcaaaaacgatccgttttgccgtaaaccgttcccctggcaggtggaaaagcaggatacggcgttattcgcgctgtaccagcgaatgattgcgctgcgtaagaaaagtcaggcgctacgtcatggcggctgtcaggtgctgtatgcggaagataacgtggtggtatttgtccgcgtgctgaatcagcaacgtgtactggtggcaatcaaccgtggcgaggcctgtgaagtggtgctacccgcgagtccgtttctcaatgccgtgcaatggcaatgcaaagaagggcatgggcaactgactgacgggattctggctttgcctgccattagcgctacggtatggatgaactaacgttttataacgccttgcgactcgcctgcgccatcatccgcggataaaactgccagaagcgggtttcgagggcgtcataatgagcgtctaaatcgtaccaggagtcacgcagggcatccagacgtgggcggcggcttgccatgccgtttaacacgttctggatgaaatccatatcgcgatagcgcaccagccactgctcactccacaagtaattgttcagattgataaaacgtggcggactgtccggcaaaatcgtcatcacttgctcgcgggcataacagacaaattcctgtagcggaaagtccgggctcagctggctccagtggcgggaaagaaagtgatcccacatgacatccagcgtaataggcgcaacgcggcgcgtttcactacgaaaccactcccgtgcttcgcggacttccggcagattgtcagtcaatacgtcgatacgtcgatgcatatgaatgccagccacgacgtcgggcggaaaactttcttcaggatttccgcgtacgaaatcagccagtaaattgccggaaaggctgctttccgcgagatgggctaaatgcaggtgagctaaaaaattcatcgattatattctatccaaaagggggtaaaggttgcagggagagcgccccggcactagactacccgcctcttattttagtctgagtcagtgtcatgcgcgttaccgatttctcctttgaattgcccgaatccctgattgcccactatcccatgcctgaacgcagtagctgtcgtttactgagcctggacgggccgacgggcgcgctgacgcacggtactttcaccgatttacttgataagctcaaccccggcgatcttctggtttttaataatacccgcgtgatcccggcgcgcctgtttgggcgtaaagccagcggcggcaagattgaagtgctggttgaacggatgctcgacgacaaacgcattcttgcgcatattcgcgccagcaaagcgccaaaacctggcgcagaactgctgctgggcgatgacgaaagtattaacgcaacaatgaccgcgcgccacggcgcactgtttgaagtcgaatttaatgatgaacgcagcgtgctggatattctcaacagcatcggccatatgccgctgccgccgtatatcgaccgtccggacgaagacgctgaccgcgaactttatcaaaccgtttatagcgaaaaaccgggcgcggttgcagccccgaccgcaggtctgcattttgacgagcctttgctggaaaaattgcgcgccaaaggcgtggagatggcgtttgtgacgttgcacgttggtgcgggcaccttccagccggtgcgcgtcgacaccattgaagatcacatcatgcacagcgaatacgctgaagtaccgcaggatgtggtagacgcggtactggcggcgaaagcgcgcggtaaccgggtgattgcggttggcaccactagtgtacgtagcctggaaagcgcggctcaggcagcgaaaaacgatctcattgaaccgttcttcgacgatacccaaatctttatctatccgggcttccagtacaaagtggtcgatgcgctggtgacgaacttccacttgccagagagcacgctgattatgctggttagcgcctttgccggttatcaacacaccatgaacgcctataaagcagcggtagaagagaaatatcgcttttttagttacggtgatgcgatgtttatcacgtacaatccgcaggcaattaatgagcgcgtcggggagtaattccgcggcgctggtttaaaacgttggactgtttttctgacgtagtggagaaaaaatgaaatttgaactggacaccaccgacggtcgcgcacgccgtggccgcctggtctttgatcgtggcgtagtggaaacgccttgttttatgcctgttggcacctacggcaccgtaaaagggatgacgccggaagaagttgaagccactggcgcgcaaattatcctcggcaacaccttccacctgtggctgcgcccgggccaggaaatcatgaaactgcacggcgatctgcacgattttatgcagtggaaggggccgatcctcaccgactccggcggcttccaggtcttcagccttggcgatattcgtaaaatcaccgaacagggcgtgcacttccgtaacccgatcaacggcgatccgattttcctcgatcctgaaaaaagtatggagattcagtacgatcttggtagcgatatcgtcatgatctttgatgagtgtacgccgtatcctgctgactgggattacgcaaaacgctccatggagatgtctctgcgttgggcgaagcgtagccgtgagcgttttgacagtctcggaaacaaaaatgcgctgtttggtatcatccagggcagcgtttacgaagatttacgtgatatttctgttaaaggtctggtagatatcggttttgatggctacgctgtcggcggtctggctgtgggtgagccgaaagcagatatgcaccgcattctggagcatgtatgcccgcaaattccggcagacaaaccgcgttacctgatgggcgttggtaaaccagaagacctggttgaaggcgtacgtcgtggtatcgatatgtttgactgcgtaatgccaacccgcaacgcccgaaatggtcatttgttcgtgaccgatggcgtggtgaaaatccgcaatgcgaagtataagagcgatactggcccactcgatcctgagtgtgattgctacacctgtcgcaattatagtcgcgcttacttgcatcatcttgaccgttgcaacgaaatattaggcgcgcgactcaacaccattcataaccttcgttactaccagcgtttgatggcgggtttacgcaaggctattgaagagggtaaattagagagcttcgtaactgatttttaccagcgtcaggggcgagaagtaccacctttgaacgttgattaatattaataatgagggaaatttaatgagcttttttatttctgatgcggtagcggcaacgggtgcaccggcgcaaggtagcccgatgtctttgattttgatgctggtggtattcggtctgattttctatttcatgatcctgcgtccacagcagaagcgcaccaaagaacacaaaaagctgatggactccattgccaaaggtgatgaagttctgacgaacggtggcctggttggtcgcgtaaccaaagtagcggaaaacggctacattgctatcgcgctgaatgacaccactgaagtagttattaaacgtgacttcgtagctgccgtcctgccgaaaggcaccatgaaggcgctgtaattaaaatttttccctaagggaattgccgtgttaaaccgttatcctttgtggaagtacgtcatgctgatcgtggtgattgtcatcggtctgctgtatgcgcttcccaacctgtttggtgaggatccggctgttcagatcactggtgcgcgcggagtcgccgccagtgagcaaacgctgatccaggtccagaaaacgttacaagaagaaaaaataactgctaagtctgtggcactggaagagggcgctattcttgcgcgcttcgactccactgacacccagttgcgcgctcgtgaagcattaatgggcgttatgggtgacaaatacgtcgtggcgcttaaccttgccccggcaacgccgcgctggctggcagctattcacgctgagccgatgaagctcggccttgacctgcgtggcggcgttcacttcctgatggaagtggatatggacaccgcgcttggcaaactccaggaacaaaatatcgatagcctacgcagtgacctgcgcgaaaagggcatcccgtataccactgttcgtaaagaaaacaactacggcctgagcatcactttccgcgatgctaaagctcgtgatgaagccattgcgtatctgagcaagcgccatccggacctggtgattagcagccagggcagcaaccagctgcgtgcggtaatgagcgatgctcgtctgagtgaagcgcgtgaatatgcggtgcagcagaacattaatatcctgcgtaaccgtgtaaaccaacttggcgtggcggagccggtggttcagcgtcagggtgctgaccgtatcgttgttgaactgccaggtattcaggacactgcgcgtgcgaaagagattctgggtgcgacggcaacgctggaattccgtctggtaaacaccaacgttgaccaggccgctgcggcatccggtcgcgtaccgggcgactctgaagtgaaacagacccgcgaaggtcagccagttgtgctgtacaaacgcgtaattctgaccggtgaccatatcaccgactccacttccagccaggacgaatacaaccaaccgcaggttaacatcagcctcgatagcgctggtggtaacatcatgtctaacttcactaaggacaacatcggcaaaccgatggcaaccctgtttgtggagtacaaagacagcggtaagaaagatgcaaatggtcgtgcggttctggtgaaacaggaagaggtgattaacatcgccaacatccagtctcgtctgggtaacagcttccgtatcaccggcatcaacaacccgaacgaagcccgtcagctgagtctgctgctgcgtgccggtgcgttgatcgcgccgattcagattgttgaagaacgtaccattggcccaaccctgggtatgcagaacattgaacaggggctggaggcttgccttgccggtctgctggtttctattctgttcatgatcatcttctataagaagtttggtctgattgcgaccagtgctctgattgccaacttgatcttaatcgtcggcattatgagcctgttgccaggcgcaacgctgagtatgccaggtatcgcgggtatcgtcttaacccttgcggtggcggtcgatgcgaacgtactgatcaacgaacgtattaaagaagagttgagcaacggacgtactgttcaacaggcaattgatgaaggttatcgtggcgcattcagttctatcttcgatgcgaacatcaccacgctgattaaagtcatcatcctgtacgcagtgggtaccggggcaattaaagggttcgcgattactaccggtatcggtgtggcgacgagcatgtttaccgcgattgtcggtacgcgtgccatcgtaaacctgctatatggcggcaagcgcgtcaagaagctgagtatctgaggagtgcgatgtggcacaggaatatactgttgaacaactaaaccacggccgtaaagtctatgactttatgcgctgggactactgggctttcggcatctctggtctgctgttaatcgctgctatcgttattatgggcgtgcgcggctttaactgggggctggatttcaccggtggtacggttattgaaattacgctcgaaaaaccggctgaaattgacgtaatgcgtgatgcattgcaaaaagccggttttgaagagccgatgctgcaaaactttggtagcagccatgacatcatggtccgtatgccgcctgctgaaggcgaaaccggcggtcaggtgttgggcagccaggttctgaaggtgattaacgaatccaccaatcagaatgcagcagtgaagcgtattgagttcgtcggtccgagcgtgggggcagaccttgcgcaaaccggtgcgatggcgttgatggcagcgctgctgtctatcctcgtgtacgtaggtttccgctttgagtggcgactggcggcaggggtggttattgcgctggcgcacgacgttatcattacgctgggtattttgagcttattccatatcgagattgacctgaccattgtggcaagcttgatgagcgttatcggttacagccttaacgacagtatcgtggtaagcgaccgtattcgtgaaaacttccgcaagatccgtcgcggtacgccttacgaaatctttaacgtgtccttgacccagacgctgcaccgtaccttgatcacatccggtactaccttgatggttatcctgatgctgtacctcttcggtggtccggtactggaaggcttcagcctgaccatgcttatcggtgtttccatcggtactgcatcttccatctatgtggcatctgcgttggctctgaaactgggtatgaagcgcgaacacatgttgcagcagaaagtggaaaaagaaggggcggatcagccgagtattctgccgtaatcaagttcccgttgatgttgaaaatcccggtcagaagatcgggattttttttgatgtatggagattgcgaaaatccccgcatcttgggaaactgcgcgtaaccctacatttcatccaggtaacttttcatggctatcatcccaaaaaactatgcgcggttagaaagcggctatcgcgaaaaagcattaaaaatctatccgtgggtctgcggtcgctgttcccgcgagtttgtttattccaacctgcgtgaacttaccgttcaccacattgatcacgaccataccaataacccggaagatggcagtaactgggaattgttgtgtctctattgccacgatcatgagcatagcaaatataccgaagcggatcagtatggtacgaccgttatcgcaggggaagatgcgcagaaagatgtcggtgaagcgaagtacaacccattcgctgacctgaaagcgatgatgaacaagaagaagtgattaaaacgtaaaattgcctgatgcgctacgcttatcaggcctacgttatttcagcaatatattgaatttacgtgcttttgttggccggacaaagcgtttacgccgcatccggcatgaacaaagcacacgttgttaacaatcagaaatgccgggaataaatcccggcattttcataatcagaagttgtaacctactaccaggtaaccaccccagccggtagagcgaacgttgaagttgccgttgccgaagttcagttctgcatcgtcgttccactgaccaccgtcgtgccagtaacgagctacgacagagtagtgccagtgatcgtagttcagagccagaatatggctggaagcgatagagttattagtacgggtcttaataccgttgattgcgttaccgctgtcatcccctaaatcggaaccccagtcgaagttggtgaagccgatgtagctcagctgaccgccccacagatcggtaatcggcacaaagtatttaattttgaaacggtaaccgtcccactcgttttcgttcgctgcgccatagttctgccactggtatttcgcatagacgttcatggacaggctcatcggcaggccagtgtcgatatcggtacccagacccatgtaccaggtgctctggcgaccatctttattacgacccatgtcgtaaatgtagttgttcgcgaagtaccactctttgaacggaccgaagctaaggtcagtattggtcagcttgtcgatggagaaacgtggttcgatttccataaacagcggagaaccgtggttccagatacctttagcatcggagttaccgccgaagaataccggcgcatccgcataaccatagaagtcgaaccagtcttttttagcgaatgcttcgtactcaaggtaggtatcgttgcggatctgcggtccgaaacgggtgtgatagcttccgacaacgttaacgctctggtgccaccagtcggaaagatactgcggtttgtcgttttcagctgcgttgacagtaaaagagctagagagcgccagtaccgcaccggctgccagtaatgtttttttcatatgtatgccactgtttgaaaatcccttgcgggagtgaaaaaggcgcaaattgcgtttctaaatatttcgtatacagaggagcctattataaaaatcattgctcacaaaaatatgtttcgtttcacagttctatcatttacgtaatcgattgcgttcacgtttacacacattcgggcggggattgtactgactttcgcccttgttgcaaacttttactatcaatccaggtgatgtaagcagagtaacaaaatgacggggaaagatgttgcgggacgcacaaaatcgtcccgaaatacgtttactgcataacaggttgaatgtcgtggatacgtacaaagcctaactgatccacagaaatcccctttaactgtaacggaatatcaacatcgctgggggcgaggacgctggcaggggcattaatcaattgattctgcacattgatttcctgaaagttgtctattgttccctgaatttgcccatattcaacagttccgctgaatgcgggcaagggatcattgctctcaccctgaatacgtagtgtaagggtggtgccatctgcatcaggcgtaatattcaccaggctcatacgtaaagtaccgatctggctttccagtcttgccggtgttttcgctccaggcagaaggtaaaccccactgctggattttgcattcagcctgttttgctgagtgattttgactgtttcttgattgagttgcgtcatctcctggttcagcgtgctgacgctgtgtttcatctgtcgcacttcactttgctgcacacaggcgctaaggctgaacaggcttcccagcaggagcagtcgaaaaacgttagtattcataggtcgtccctttctcgtcgcaattagcctaatggtagagggtaaaagcagcgaaagcatcgatcctttatctcaaaagcgttgcgcctttgttgtatcgtcagttcagggtaaaatagatttccgttaaccacctggtcaggacgccgtatgcattgcccattctgtttcgccgtggacactaaggtaattgactctcgtctcgtgggcgagggtagttccgtacgccgccgtcggcagtgtctggtgtgtaatgaacgtttcaccacctttgaagtggcggagctggttatgccgcgtgttgtaaaaagcaacgacgtgcgtgaaccgtttaatgaagagaaattgcgtagcggaatgctgcgggcgctggaaaaacgtccggtgagttccgatgacgtcgaaatggcaatcaatcatattaaaagccagctgcgcgccaccggtgagcgcgaagtgccgagcaagatgattggcaatctggtgatggagcaattgaaaaagctcgataaagtcgcctatatccgttttgcctctgtctaccgcagtttcgaagatatcaaagaatttggcgaagagatcgcgcgcctggaggactaagccgtgcaggacgagtattacatggcgcgggcgctaaagctggcgcaacgaggacgttttaccacgcatcccaacccgaatgtcgggtgcgtcattgtcaaagatggcgaaattgtcggtgaaggttaccaccaacgtgcgggtgaaccacatgccgaagtacacgcgttgcgtatggcgggtgaaaaagccaaaggtgcgaccgcctatgtcacactcgaaccctgtagccatcatggtcgtacgccaccgtgctgtgacgcactcatcgccgctggcgtagcgcgcgtggttgccagcatgcaagatcctaacccgcaggtcgctgggcgtggactttaccgtctgcaacaggctggcattgacgtcagccacggcctgatgatgagtgaagccgagcaattgaataaaggctttctcaagcggatgcgcaccggctttccttatattcagttaaaacttggcgcaagccttgatggtcgcacggcgatggcgagcggcgaaagccagtggatcactagcccccaggcgcggcgtgatgtacaactactgcgcgcgcaaagtcatgccattttaaccagcagcgccacggtgctggcggatgatcctgccttaacggtgcgttggtctgaactggatgaacaaactcaggcgctctatccgcaacaaaatctccgtcagccgatacgtattgtgattgatagccaaaatcgcgtgacgccggtacatcgcattgtgcagcagcccggcgaaacctggttcgcgcgtacgcaggaagattctcgtgagtggccggaaacggtgcgtaccttgctgattccagagcataaaggtcatctggatctggttgtactgatgatgcaactgggtaaacagcaaattaacagcatctgggtggaagcggggccaacgctcgctggcgcattgctgcaggcgggtttagtcgatgagctgattgtctatatcgcacctaaactattaggcagcgacgcccgcggattatgcacgctgccagggcttgagaaattagccgacgccccccaatttaaattcaaagagatacgtcatgtaggcccggatgtttgcctgcatttagtgggtgcatgatctcccggctcgaaagggaagcagcgcacgaaatattatgctaaaatccgcccccctgcggggccatactcgaacccgaaggaagaaaatgaacattattgaagctaacgttgctaccccggacgctcgcgtcgccatcaccatcgcgcgtttcaacaactttatcaatgacagcctgctggaaggtgcaattgacgcactgaaacgtatcggtcaggtaaaagatgaaaacattaccgttgtttgggtgcctggtgcctatgagctgccgctggcggcgggtgcactggctaaaaccggtaaatacgacgcggtgattgcgctgggtacggttattcgtggtggcactgcccactttgaatatgtcgctggtggtgcaagcaacggcctggcgcatgttgcccaggacagcgaaattccggttgcttttggggttctgaccactgaaagcattgaacaagcgatcgaacgtgctggcaccaaagctggcaacaaaggtgcagaagctgcactgaccgcgcttgaaatgattaatgtattgaaagccatcaaggcctgaaattagtaaggggaaatccgtgaaacctgctgctcgtcgccgcgctcgtgagtgtgccgtccaggcgctctactcctggcagttgtcccagaacgacatcgctgatgttgaataccagttcctggctgaacaggatgtaaaagacgttgacgtcctgtacttccgtgagctgctggccggggtggcgactaataccgcatacctcgacggactgatgaagccatacctgtcccgcctgctggaagaactgggacaggtagaaaaagcagtactgcgcattgcgctgtacgaactgtctaaacgtagcgatgtgccatacaaagtggccattaacgaagcgatcgaactggcgaaaagcttcggcgcagaagacagccataagttcgtcaacggcgtactcgataaagcagcacctgtgattcgccctaacaaaaagtgatatccaggccggtagattcacggaagaccgttccatgatcgccggccttttcttttttacctgctgaggcataacgtatggcatgtggcgagttctccctgattgcccgttattttgaccgtgtaagaagttctcgtcttgatgtcgaactgggcatcggcgacgattgcgcacttctcaatatccccgagaaacagaccctggcgatcagcactgatacgctggtggcgggtaaccatttcctccctgatatcgatcctgctgatctggcttataaagcactggcggtgaacctaagcgatctggcagcgatgggggccgatccggcctggctgacgctggcattaaccttaccggacgtagacgaagcgtggcttgagtccttcagcgacagtttgtttgatcttctcaattattacgatatgcaactcattggcggcgataccacgcgtgggccattaagtatgacgttgggtatccacggctttgttccgatgggacgagccttaacgcgctctggggcgaaaccgggtgactggatctatgtgaccggtacaccgggcgatagcgccgccgggctggcgattttgcaaaaccgtttgcaggttgccgatgctaaagatgcggactacttgatcaaacgtcatctccgtccaagcccgcgtattttacaggggcaggcactgcgcgatctggcaaatagtgccatcgatctctctgacggtttgatttccgatctcgggcatatcgtgaaagccagcgactgcggcgcacgtattgacctggcattgctgccgttttctgatgcgctttctcgccatgttgaaccggaacaggcgctgcgctgggcgctctctggcggtgaagattacgagttgtgtttcactgtgccggaactgaaccgtggcgcgctggatgtggctctcggacacctgggcgtaccgtttacctgtatcgggcaaatgaccgccgatatcgaagggctttgttttattcgtgacggcgaacctgttacattagactggaaaggatatgaccattttgccacgccataaagatgtcgcgaaaagtcgcctgaagatgagtaatccgtggcatctacttgctgtcggattcggaagtggattaagcccgatcgttcctgggacgatgggcagcctggcagcgattccgttctggtatctgatgacctttttgccctggcagctctacagcctggtggtgatgctggggatctgtatcggcgtctatctttgtcatcaaacggcgaaagacatgggtgtgcacgatcatggcagcattgtctgggacgaatttattggtatgtggatcacgctcatggcgctgccgaccaatgactggcagtgggttgccgccgggtttgtgattttccgtattctggatatgtggaagccgtggccgatccgctggtttgatcgcaatgtgcatggcggcatggggatcatgatcgacgatattgtcgccggggtgatttccgcaggcatcctgtattttatcggtcatcactggccgctgggtattctgagctaattgtgcaccgatgcctgatgtgacgcttgtcacgtctcatcaggcctggactcttatttaaatcctacgacaggatgcggtttatacggcgtttccagttcggcaatctgttccggcttcaaagtgatatccaccgcgttcaatagctcatcaagctgttcttcgcggctagttccgataatcggtgcggcaatgcccggtttactcaacaaccaggccagcgcaacttgtgctcgtgtcgcccccagttcttcactgacgcctgttaaccgctctgcgatctgcgcgtcattttcatcgctttctttatagagatttttccccacctcatcagacaccagtcgtgcggtagtttctccccacggacgcgtcagacggccccttgccagcgggctccatggaattaccgccacgccctcctgataacacagtggtagcatctcgcgctcttcttcacgataaatcagattgtagtgatcctgcatactgacaaactgcgcccagccgtgctgtttttggagttccagtgcctgagcaaactggctagcgtgcatactactcgcgccgatataacgcgctttcccggcttttaccacgtcgttgagggcttccagcgtctcttcgatcggcgtgttgtaatcccagcgatgaatttgcaggatatcgacataatccatgccgagacgtcgcaggctgtcgtcgatagagcgcaaaatttgcgcacgggataatccttccggtaaatcaccaacgcgatggaacactttggtcgcaacgaccacgtcttcacgacgggcgaaatcccgcagtgcgcgaccgacgatctcttcgctgctgccgtcagaataactgttggcggtatcaaagaaatttatgccgccttccagtgcacgtttaattatgggacggctgctttcttccggcagtgtccatgcgtgattaccgcgatctggctcgccaaaggtcatacagccgaggcaaagtcgggaaacgcgaaggtcggtttttcctaaggggttgtattgcatgctgccactcctgctatactcgtcatacttcaagttgcatgtgctgcggctgcattcgttcaccccagtcacttacttatgtaagctcctggggcttcactcgtttgccgccttcctgcaactcgaattatttagagtctatgaataatttcttaagcatagcaggagtggagtagggattatgccagccaggccttgattttggcttccataccagcggcatcgaggccgagttcggcgcgcatttcttcctgagttccttgcggaataaagaagtccggcaggccaatgttcagcacgggtactggtttacgatgggccatcagcacttcgttcacgccgctgcctgcgccgcccataatggcgttttcttctacggtgaccagcgcttcatggctggcggccatttccagaattaacgcttcatcaagcggtttcacaaaacgcatatcgaccagcgtggcgttcaggctttcggcgactttcgccgcttctggcatcagcgtaccaaagttaaggatcgccagtttctcgccacgacgcttcacaatgcctttgccaattggtagtttttccagcggcgtcagttccacgccgaccgcgttgccacgcgggtagcgcaccgcactcgggccatcgttatagtgatagccggtatagagcatctggcgacattcgttttcatcgctcggggtcataatgaccatttccggtatgcagcgcaggtaagagagatcaaaagcaccctgatgggtttgaccgtcagcaccaacaatgcccgcgcggtcgatggcgaacaggaccggaagcttttgaatcgccacgtcatgcagcacctgatcataggcgcgttgcaggaaagtggagtaaatcgcgacaatgggtttgtacccaccaatcgccagacccgcagcaaaggtcaccgcgtgttgctcggcaattgccacgtcgaagtagcgatccgggaatttacgactaaactcgaccatgccggaaccttcacgcatcgccggagtaatcgccatcagcttgttgtctttcgctgccgtttcgcacaaccagtcgccaaagattttactatagctcggcaaaccgccgctacttttcggcaaacaaccgctggagggatcaaatttaggcacggcgtggaaagtgatcgggtctttttctgccggttcataaccacgaccttttttggtcatgatatgcaggaactgcgggcctttcaggtcgcgcatgttctttagcgtggtgataagccccagcacatcgtgaccgtccaccgggccgatgtagttaaagcccagctcttcaaacaacgtgccaggcactaccatgcctttaatatgttcttcggtgcgtttgagcagctctttaattggcggcacgccagagaaaacttttttcccgccttcgcgcagactagagtaaagcttaccggaaagcagctgtgccagatggttgttgagcgcgccgacattttcggaaatgctcatttcattgtcgttgagaatcaccagcatatcaggacggatatcgcccgcgtgattcatcgcttcaaacgccatgcctgcggtaatcgcgccatcgccaatgacacagacggtgcggcgatttttgccttctttttcggcagcaaccgcaataccaattccggcactgatggaggtactactatgcccgacgcttaatacgtcatattcgctttcgccgcgccacgggaacgggtgcagaccgcctttctgacggatggtgccgattttgtcgcggcgtccggtcaaaattttatgcggataagcctgatgccccacatcccaaatcaattggtcaaacggggtgttgtagacatagtgcagcgccacggtcagttcgaccgtgcccagcccggaggcgaagtgcccgctggaacggctcacgctgtcgagtaaatagcggcgcagttcgtcgcagagtttcggtaaactctctttcggcaacagtcgtaactcctgggtggagtcgaccagtgccagggtcgggtatttggcaatatcaaaactcatcaggggcctattaatacttattgtttatttattacgctggatgatgtagtccgctagcgcttccagtgcgctggtatcgagactctgttcagccagttgtttcaggctctgacgggcatcgtcgatcagatcccgggctttcttccgggcttgctcaagacccagaagtgcagggtaggtacttttaccaagttgctggtcggcaccctggcgttttcccaacgttgcagtatctcccaccacatccaggatgtcatcctgaacctggaaggcaaggccgatgctctctgcatacttgtcgagtaccggcagagcacgacgtcctttatctccggcgcttaatgcaccaaggcgaacggcggcgcgaatcaatgcgccggttttatgacgatgaatacgctcaagcgcgtccagaggtacgtgtttgccttccgcgtctaaatctaatgcctgaccaccgcacattccggcaataccactggcgctcgccagttcagaaatcatgctaattctgtcgcggtcgctcacttccggcatatcggcatcgcttaaaatgctgaacgccagcgtttgtaaagcgtcgccagcgagaatcgcgtttgcttcgccaaacttcacatggcaggttggcaaaccgcgacgcagatcgtcatcatccattgccggtaaatcatcatgaattaaactgtaagcgtggatacactcaacggcggcagcgggtgcgtccagcgtgtttgtgctaacgccgaacatatgaccggtggcataaaccaggaaaggtcgcaggcgcttaccacctaataatgcgccatactgcatggtttcgaccacgggagtgttctgaaagggcagtggggcgataaaacggctcagcgcctggttggcctgcttaacgcaggcttcgagttgctgcggaaagtccattactcattgtccggtgtaaaaggggttagagaggcgtcttcattgtcagacagcagaatttgtacgcgctgttcggcttgttgtaatttggcctgcccctgacgtgccagctgcacgccgcgttcgaactcgttcagcgcctcttccagcggcaggtcgccactttccagacgggttacaatctgttccagctcgctcagcgccttttcaaagctggcgggcgcctcatttttcttcggcataatgaatgtctgactctcaatatttttcgccccgtcatggtaacggactcagggcaaatagcaaataacgcgcaatggtaaggtgatgtgcacagcaaagcgatgttagtggtatacttccgcgcctggatgcagccgcaggtgtgggctgctgtatttttccctatacaagtcgcttaaggcttgccaacgaaccattgccgccatgaagtttatcattaaattgttcccggaaatcaccatcaaaagccaatctgtgcgcttgcgctttataaaaatccttaccgggaacattcgtaacgttttaaagcactatgatgagacgctcgctgtcgtccgccactgggataacatcgaagttcgcgcaaaagatgaaaaccagcgtctggctattcgcgacgctctgacccgtattccgggtatccaccatattctcgaagtcgaagacgtgccgtttaccgacatgcacgatattttcgagaaagcgttggttcagtatcgcgatcagctggaaggcaaaaccttctgcgtacgcgtgaagcgccgtggcaaacatgattttagcagcattgatgtggaacgttacgtcggcggcggtttaaatcagcatattgaatccgcgcgcgtgaagctgaccaatccggatgtgactgtccatctggaagtggaagacgatcgtctcctgctgattaaaggccgctacgaaggtattggcggtttcccgatcggcacccaggaagatgtgctgagcctcatttccggtggtttcgactccggtgtttccagttatatgttgatgcgtcgcggctgccgcgtgcattactgcttctttaacctcggcggcgcggcgcatgaaattggcgtgcgtcaggtggcgcattatctgtggaaccgctttggcagctcccaccgcgtgcgttttgtcgctattaatttcgaaccggtcgtcggggaaattctcgagaaaatcgacgacggtcagatgggcgttatcctcaaacgtatgatggtgcgtgccgcatctaaagtggctgaacgttacggcgtacaggcgctggtcaccggcgaagcgctcggccaggtgtccagccagacgctgaccaacctgcgcctgattgataacgtctccgacacgctgatcctgcgtccgctgatctcttacgacaaagagcacatcatcaacctggcccgccagattggcaccgaagactttgctcgcacgatgccggaatattgtggtgtgatctccaaaagcccgacggtgaaagcagttaaaagcaagattgaagcggaagaagagaagttcgacttcagcattctcgataaagtggttgaggaagcgaataacgttgatatccgcgaaatcgcccagcagaccgagcaggaagtggtggaagtggaaaccgtcaatggcttcggcccgaacgacgtgatcctcgatatccgttctatcgatgaacaggaagataagccactgaaagtcgaagggattgatgtggtttctctgccgttctataaactgagcaccaaatttggcgatctcgaccagaacaaaacctggctgctgtggtgtgagcgcggggtgatgagccgtctgcaggcgctctatctgcgcgagcagggctttaacaatgtgaaggtatatcgcccgtaatttgtggtttttacgtcgcatctggtcagatgcgacgtttgccgcatccgacattactcgtaataattataaatccctgccgccatcaccagttgacttgccacttcatgggctttttcacgcccaaccaacaggtcgataattttcagaccaaagtcgatagctgtacccggcccctggctggtcagcaattttacccgtgcatcccagacgacgcgcttgtccagccattgttcggcgggaattttgtctttcagcgtcgggaagccggtcatattaccaatcgggaagatatcgtgcggcaccagcacggtggctggcgcggcgcaaatagccgcgacgatacgcccggaacggtggaactgtttaacggtttcaaccagcagagtgctatcgcgaaaacactccgcgcctttaatgccaccaggcagcacgatcacgtcatattcgccatcagccacttcgaccagcggcgcatccgccagcagcttcacgccgcggctgcaggtaatcgccaggttaccatcgctggcgacgctggcagtggtgactttgataccgccgcgaaccagcagatcgatagtggtgacggcttcagtctcttcactaccaggggcgaggcaaaccagtgcgcttgcgctcatattcactctcctttctttttttaattaccaggggcgaggcaaaccagtgccgatgcgctcatattcactctcctttctttttaccatttcaaacaggcgggtgttttccggtacggcaatcccatgcgcgcgggcgcggcgtaagagaaaaccattgatatagtcgatttcagtgtggcgcagcgcgcggatatcctgcaacatgctgctgatattttccgctgtggcatcaatcacctgcatcacgtaatcacgcaaatcttctgcactagtatgatgcccttcgcgttcgatcaccgccgcgacttcttcgcatatctgcataatttcttgcggatgatgacgtaattcaccgttcgggcaattccagatggcagtcagtggattaatcacgcagttgactgccagcttgcgccacagctcggcgcgaatattgttatgccaggcaacgtcaggcaacacggtttgcaaaatatccgccagataactgtaatccccgtcctgttgccgtgccgggccaatatgcgtgataccgtttgccacatgaataatgacattgccgtcgcggcgggctgcatgggtggtggtgcccatcagtaatggctgctgaatgttttgcaactcttcgatggtgcccatgccgttgtgaattaacagtattggcgtagttacaggcagtgtggacgcgaggcttttgacggcatcggaaacctgccatgctttcagcgtcaccaggagcagatcgctggtggcgagaaaatcgggatcgttggcggtcaggctttcgttaaatatgctaccatctgtctcaaccagattcacgctacaataaggttgcggtacgcgcagccagccctgaacttcatgaccctgtttgcaaagtgctgtaagccataattgccctaaggcaccgcatcccaatacggtaattttcattgttcctcctcacccgcaaccactccgggtgttcaataaggctatcccttaattgtgcatgctgttgcgactatgcacaattaagggatacgtcctggtgcaggactgtcggttatttaactttgcgggtattatgcttcgcatcaaaaatgaagggagaggaaaagatgccatctttcgatattgtctctgaagttgatcttcaggaagcacgtaacgcggtcgataacgcgagccgcgaagtggagtcccgttttgacttccgtaacgttgaagccagttttgagctgaacgacgccagcaaaaccatcaaagtgttgagcgagtccgatttccaggtcaatcagttgctggatattctgcgtgccaagctgctgaagcgcggcattgaaggcagtagcctggatgtaccggagaatatcgttcatagcggtaaaacctggtttgtggaagcgaaactgaaacagggcattgagagcgcgacccagaagaaaatcgtcaagatgatcaaagacagcaaactgaaagtgcaggcgcaaattcagggcgatgaaatccgcgtaacgggcaaatctcgtgatgatttgcaggctgtcatggcgatggtacgtggtggcgatctcggtcagccgttccagttcaaaaacttccgcgattaatcgcgactatgtgcgttttgttcatgtcagatgcggcatgaacgcctgattcggcctacaaaggtttgtaattcagaaactttgtaggcctgataagcgtagcgcagcaggcaattcgccgcgttttttatgcctgacgaattgcctgttctatctcaaagcgattcgtcactttgctgtcgattttcacataagcactatgttcttcttctgcaatcaacacttctttgatgccttcagtttctagcaaacgcacttttaacgcctcgtttgcggcaatgttcgccgggatttcaatgcgcaaactgctgacatacggcggttctttcatggtactggcgactgtcagccacactgcggccagcattgcgccagcgagaaataccccctgaccgtcaaacatgccgttaatccagccgcccaggctaccgccaatcgccacgccaagaaactggctggtggagtaaacacccatcgccgtacctttgtaacctgctgggctctctttactgataagactgggcaggagggcttccatcaaattaaacgccacaaagaaaagctgcacgccgaccaccagttgccagaactgcgtttgcgcgttccacaacacaatttccgcaaccacgatcaacccgacgcagaagacaaagacttgcttcattttgcgcttaacttcagcgtagataatgaaaggcacgacgctgccaaaggcgattagcattgtcgccagatagaccttccagtgttcagccgccgggaaccctgcatcagccagttgtccgggcagggcaacaaacgtgctcatcagcaaaatatgcagacacataatgccaaagttgagtttcagcagccgcggttccgccagcactttactgaaactgcctttcaccattccggactcacgattaagtacgtgagtgctactgttgggcacaacccaaatggtcaacgcaatgccggtcgttgccagaatagcgatcatccagaacagcgcgtgcagcccaagtttgtgagtgatgatcgggccaagcaccatcgcaatggcaaaggtaatgccaaagctcacgccgataaacgccatcgctttggtgcggttttgttcgcgcgtgagatcggaaagcagcgccataacggcggcggcaattgctccagagccttgtagcgcccggcccagaataattccccagatggagtcggaaagcgcagcgataacgctaccggcggcaaacaccgccagcccaccgacaattaatggtttgcgaccaatgcggtcggaaagcaggccaaacggaatctgaaaaacggcctgagtcagaccataaataccaatggcaataccgattaatgcttcgctggcaccttgcagagccatgccgtacgtggtcagaaccggcagaaccataaacatgcccagcatgcgcaagctgaatacggtccctaaaccccaggtcgcgcgcctctcacctggcgtcattttataatcgttcattaccacctctgttttaaattcgcgactagtgtaaagcggcaaacgaatggggtaaacatgcggattttttagtaaatatttcgagagggatatgtttctaatgctaagaaaaaaggtgccgtagcacctttttaatagagaggttttgttaccacacagcagccagcagcgtatggctgtccggtaccataaaatcaacggacatcatcacgctgagggcagtgatggcgatgatagagaagccgaacagcttgcgcgcccagattctgtcatcagcaactttataaccgcgcagagccatacctaaccaccagacgctaaccgccgcggcgaccaccagatatttatacccagcgtaaccgccaagagagagcatcagcgtggcaacggcaaaggcgatgatatacagcgtgatgtgattcttcgccacgctaatgccttttaccactggcaataccggaatgtttgccgcctggtaatccttaaagcggaaaatggcgatggcataggagtgaggcatctgccacaggctgaagatagccagcaggatcgctgcgccgctatcgaactcaccggttaccgcacagtagccgatcaccggcggcgcagcgccggagaggctaccaatcaacgtgccgtagacagagtggcgtttcatgtacaggctataaacgccgacataaaccacaaagcccatcacccccagccagcaggccagcggattcgcgccaaaccacagcagcataaagccagcaatacccagcaacgtggcgtacaccaggctgacagcaggagagatcaggcctttcaccagcacccgattcttcgtcctttccatctttctgtcgatatccctgtcgatgtagttgttaaacacacaaccgctcgccacaaccagactcaccccaaccagcgtgtagataaacaggggataatcaatgctgcccttactggccagcaggaatcccccaatcacgctgatcaggttgccaaagatgatgcctggtttcgttacttgcaggtattgcttaaacatcataaccgccgctcttagtgcatcatcatgttgtagttgaggttccacataatccagatggagcctacaaccaggatagcgatgattagcacggtgaagacaaacgccgtcatgttccagccttcatcacttttggtattcatgtgcaggaagcacaccagatgcaccagaacctgtaccactgccattgccaggattgttcccagaattacggccggagaggcagctcctgtcatcaccatccagaacggaatcaccgtcagaatgatgctcaggataaagcctgtcatgtaggtttttacgctgccatgggacgcgccgctgtgatcggtagaatgactcattacatcgcccccatcagataaacaacagtgaacacacagatccaaaccacatccaggaagtgccagaacaggctcaggcacatgatgcgggtacggttagtgctggtcaggccgcgacgggcgatttgcaccatcagcaccgccatccagataagaccagaagtgacgtgcagaccgtgcgtgccgaccagcgcaaagaacgcactcaggaagccgctgcgatccggacccatgccgttaacaatcaggtgatggaattcatagatttccatcccgataaatccggcaccaaacaaccaggtcaacgccagccaggagataacctggcttttgttgtttttgtacatggcgatagccgccatgccgtaggtgatggagctgaacaacagcaagaaagtttcaaccagaacgaacggcagttcgaaaatgtccttacctgtcgggccgcctgcggtgccgttcaccagaacggcataggtagcaaacaagatagagaacagaatgcagtcgctcatcaggtagatccaaaatccgaagattttggttccgcctgcatcgtggtgcccgtgttcgtgcgcgtgggcagtcgcgtgcgtcaaagtatcagttgccatttttcagccctgccttagtaatctcatcgaaatgctggttttccagtttttcgatttctgccaccggcacgtagtaatccacgtcctcgtcgaagcttttcacgatccaggtgatgatcatgcctgcgaagccaacaatcgccagccaccagatatgccagatcatggcgaaaccgaagatggtggagaaagctgcaatgacgatacctgcaccgctgtttttcggcatatgaatttcttcatagtggtcaggctttttatacgcttcgcctttctctttcatttcccagaatgcatcacgttcgtgaacgtgcggcactacggcaaagttatagaacggaggcggggaagaggttgcccactccagcgtacggccaccccacgggtcgccagtcaggtcacggttctggtcgcggtcgcgaatagaaacgtacatctgaataacgaggcagagaatacccagcgcaatcagtactgcaccgctggctgcaatcatcagcatggtgtggaactgcgggtcaatctgctggctcaaacgacgggtcatgcccatgaagcccagcgcatacagtggcataaaggcaacgaagaagccgatgatccagaaccagaacgcgcgtttaccccaggtttcgttcagtttgaaaccgaacgctttaggccaccagtaggtcatccctgcgaagcagccgaagaccacgccgccgatgatcacgttatggaagtgcgcaatcaggaacaggctgttatgcagaacgaagtccgcgcccggtacggccagcagcacgccagtcatcccgcccacgctgaaggtgacgataaaaccgatggtccacagcatcgcagaatggaacacgatgcggccctgatacatggtgaacagccagttgaagatcttcaccccggtcgggatggcgataatcattgtggtgataccaaagaaggcgtttacgttcgcgcccgcacccatcgtaaagaagtggtgcagccaaacgatgaagctcagcacggtgatacagacggttgcccataccaggctggtataaccaaacagacgtttacggctgaaggttgccgcaatttcggagaacacaccgaaaacaggcaggatcaggatgtaaacttccgggtggccccaggcccaaatcaggttgatgtacatcatcatgttgccacccatatcgttggtaaagaaatgggtgcccagatagcgatccagggtcaacaacgcgacggtaaccgtcagaattgggaaggaagcaataatcagtacgttcgcgcacagacttgcccaggtaaatactggcatcttgaacatggtcatgcccggtgcgcgcatcttcagaatggtaacgaagaagttgataccggtaagcgtcgtacctataccggatagctggagactccatatccagtaatcgacaccgactcccggactgtactctattccgcttagcggtggataggccagccagccggtctgcgcaaattcgcccacgccgagagaaacgttaaccagaatcacaccaacaacggtaaaccagaagcttaagttgttgaggaacgggaacgcaacgtcacgcgcgccgatctgcagcggaaccaccaggttcatcagaccgataacgaaaggcatcgccacgaagaagatcataatcacgccgtgcgcggtaaagatctgatcgtagtggtgaggtggcaggaagcccgcttcgcccgcgctggcaagagcctgctggctacgcatcataatggcgtcagcaaaaccacgcagcaacatcacaatcgccacgatgatatacatgataccgaggcgtttatggtcgacggaggtcagccactctttccacaggtaggtccacttaccgaagtaagtgatcaggccaacgagcgccagacctcccaaaataatgccagcgatcgtaaccatgacgataggttcatggaacgggactgcatcaagacttaattttccgaacatctttattcttcctcaacccctttaatgggcggattccgcgtggctcatgtccatgccttccataccttcgtgtgcgctgtgctcaccttctggctgggtcatgtccatgctcttaccgtgagccataaacttgttaattacatcggcaaacaagtctggtttcacgttggagaaatattccacctggttgtattcgctaggcgcggccagtttttcgaacgcagccatgtcagacatggtgttcgggctctgcttcgcttttgcgacccactggtcgaatgcggcgcgatccggtgttgcaatagctttgaacttcatgccactgaagcccgggccgctgtagctggcggagataccgtcataagtgccgggttcgttggcgatcagatgcaggcgagtctgcataccggccatggcataaatctggctacccagacgcggaatgaagaaggagttcatcacggagttggaggtcactttgaagtacaccggagtgttcgccgggaaagcgatttcattcacggtagcaatgccctgttccgggtagatgaagaaccatttccagtccatggaaaccacttcgatggtaatgggcttctcgtcgtgtgccagcggcttgctaggctcaagagcgtgagtggttttccaggtcagtactgcaaggaagatgatgattaagataggtaccgtccagaccacagcttccactttattggagtgactccagttcgggctgtacttagcatctttattgctcgcacggtacttccaggcgaaaccaacagccatcaagattgcgggaataacgacaatcaacatcaggccaaatgccgtcagtatcagactacgttgctccagaccaatctgtcctttgggatctaacagcgcagaattacagccactgagcaatacagtgcctgcaaataaactcaaccatcccaaacttttattgtatttcctgagtctcatttaacgacctcaattccacgggatctggtggcgtttaaagtgtgtgggcattttacgggaaggttacattactgtaaacatgattaaattcctgttacttggatttggctgccaggtcacatatgttgcaaaacatatcaggttgattttaagaagctgttgcaaaagggcgttataacaaaaggggagtgctgaaggagtctgggcgggcaattggtataaccaatgtgaaataaaacaattatttaacaaataattatcattagagtgacaactgggtgatgagaaaataaagactcattagctgaatcgtgtaagaaaaatagaatttataaatggcgccaataatttccaaacgctaagccgcacaaaagaacaaatattaataagcgatactgatgtttatttagccgtaataattacggcgagtgattactacagctaaataatatttacagattacgtcagatgcgtttttcgtagcgccagataatccagcaaaccaccaagcacgacgccagaaagggcgactaaaaccccgacttccagcagagcaggcaggaaagagaagtgcgtcaaatccagcgcgtccatcgtcaatagcagtaaccacacggccaacaggctgacgcccgccgccagtgtccacatggcaaaggcataacctgccggatatgcggtacgggagataaagttgtcatttactcgtgtatattcaagcgtctggcggcaaaccagcagcaaaataagccctggtacggcagcggcgacggagaatagatagaatgtgctccagccgtgtgcttcaacaaaccaacccgccacggggccgacataaactcgccctacagcagaaagcgcactgagcagggcaaattgagtagcggaaaaactcttattacatagcgtcattaacagcgcgacaaaggcacttgtgcccatcccgccacagaggttttcgaaaaagacggctgcgcccatgctgtagagatgcttatcagtaatgctcagcagccagtaaccggcgttagacgcaccttgtaaaatgccgaaaatcagcagtgcccggaacagactcaggcgctgcatcaaaatcccaccgtacaatgcgccaacaatggtcgctagtaagccaagcgttttgttaaccacgcctacttcacccgcatcaaacccgacgccgcgaatcaaaaacgtggttgtcaggctcatggcgaatgcgtcgcccagcttatacagcacgataagaagcaaaataagccaggcattattgcgaccaaagaaatctcgcagaggtgcaacaaccgcttgttccagcgttttgggcacaggaatggtgtcggttggttctggtgcaagcaacgtcgcgataatacaggggatcaacagtgccgccattaaccagtacatgccctgccagcccagccatttatctgccagccacagggctaggccgccggaaaccagcatccctaaacggtaacccagcacgctgattgccgcgcccgcaccacgttcttctgccggaagcacatcggttttccacgcatcgaagactatatcctgggaagcagagcaaaaagcgatcaccactgccagcgccgccatccagcggagttgggtgcctggttcgagaaaacccatcgccgcaatggcgactaataacaggatttgcgtggcgagcagccaaccgcgccgccgcccaaaaaatggaggcgtgtagcggtccatcagcggactccagaggaatttaaaaacgtaagcctggcctaccagagagaagaaaccaatggttttgagatcgatattctcgaccgtcatccaggcctgtaaggtaccggatgtcagggcgagcggtagcccggaagcaaaacccaggatcagcaatatggcactacgcggctgttgaaaaatacgtaaatattgactggacatgggcgtctacaggcccggcttgcaccgggccagagggcagaaattaacgcgcgttctgcttgatgaattcgtggatgctggtgtcctgagacatatcagcgatggtatcggtcagcacactgttaaccgcatcggcgatatttttgttggaggcctggaacgcaccttcaacgttgtagctggcacgatagtttttggtcattttgttgccattctgcgcggtagcgatgatggcgatatccgctttggtcgcgatgttgtagcgcacgttgccctgggacacgtcagcatacagttggctaacgatgatttgcagattaaccgggccattcggaccaaccatgtaaccacgcgcggtcatctgtttttccagcacttcttgcagcaggaaacgcagatcgcgggaggcggtcagggtaacgatttgattatcgcgggtgacttttgccagcgcctgatcggtacgctgatcggcaccattaatgcttacggtgacgcccatcaggcttggatcctgctgtggcagtgtaatcgtcggggaaacttcaatagttgttggcggttttgcgcatcctgcaagcataaacagagcaactaacgggaagaggatttttttgaacatgttcgggctctcagagactcttaagcgtgtttggtaaaaattcccgccatcataacattgccaacggcgaggggaagtgggtaaggcatgtaaattcatcatgttgacgaaataatcgcccctggtaaaagaaacactgatgcgaggcctgtgtttcaatctttaaatcagtaaacttcatacgcttgacggaaaaaccaggacgaaacctaaatatttgttgttaagctgcaatggaaacggtaaaagcggctagtatttaaagggatggatgacatctcagcgttgtcggaggagatatttcatgatgatacgtgagcggatagaagaaaaattaagggcggcgttccaacccgtattcctcgaagtagtggatgaaagctatcgtcacaatgtcccagccggctctgaaagccattttaaagttgtgctggtcagcgatcgttttacgggtgaacgttttctgaatcgtcatcgaatgatttacagtactttagcggaggaactctctactaccgttcatgcgctggctctgcatacttacactattaaggagtgggaagggttgcaggacaccgtctttgcctctcctccctgtcgtggagcaggaagcatcgcgtaaaaacgcatttgcaactgtcggcgcttttccagtatgttgctaaagattttatgaaaaacggcctgcgggccgttttgttttgtctggattttgcgctttttgcccagcattcagacgaaaattgcccgggaattgtgaaaaaatacgcgacagcgcgcaataaccgttctcgactcataaaagtgatgccgctataatgccgcgtcctatttgaatgctttcgggatgattctggtaacagggaatgtgattgattataagaacatcccggttccgcgaagccaacaacctgtgcttgcggggtaagagttgaccgagcactgtgattttttgaggtaacaagatgcaagttagtgttgaaaccactcaaggccttggccgccgtgtaacgattactatcgctgctgacagcatcgagaccgctgttaaaagcgagctggtcaacgttgcgaaaaaagtacgtattgacggcttccgcaaaggcaaagtgccaatgaatatcgttgctcagcgttatggcgcgtctgtacgccaggacgttctgggtgacctgatgagccgtaacttcattgacgccatcattaaagaaaaaatcaatccggctggcgcaccgacttatgttccgggcgaatacaagctgggtgaagacttcacttactctgtagagtttgaagtttatccggaagttgaactgcagggtctggaagcgatcgaagttgaaaaaccgatcgttgaagtgaccgacgctgacgttgacggcatgctggatactctgcgtaaacagcaggcgacctggaaagaaaaagacggcgctgttgaagcagaagaccgcgtaaccatcgacttcaccggttctgtagacggcgaagagttcgaaggcggtaaagcgtctgatttcgtactggcgatgggccagggtcgtatgatcccgggctttgaagacggtatcaaaggccacaaagctggcgaagagttcaccatcgacgtgaccttcccggaagaataccacgcagaaaacctgaaaggtaaagcagcgaaattcgctatcaacctgaagaaagttgaagagcgtgaactgccggaactgactgcagaattcatcaaacgtttcggcgttgaagatggttccgtagaaggtctgcgcgctgaagtgcgtaaaaacatggagcgcgagctgaagagcgccatccgtaaccgcgttaagtctcaggcgatcgaaggtctggtaaaagctaacgacatcgacgtaccggctgcgctgatcgacagcgaaatcgacgttctgcgtcgccaggctgcacagcgtttcggtggcaacgaaaaacaagctctggaactgccgcgcgaactgttcgaagaacaggctaaacgccgcgtagttgttggcctgctgctgggcgaagttatccgcaccaacgagctgaaagctgacgaagagcgcgtgaaaggcctgatcgaagagatggcttctgcgtacgaagatccgaaagaagttatcgagttctacagcaaaaacaaagaactgatggacaacatgcgcaatgttgccctggaagaacaggctgttgaagctgtactggcgaaagcgaaagtgactgaaaaagaaaccactttcaacgagctgatgaaccagcaggcgtaatttacgcagcataacgcgctaaattcgcacaaaggcccgtcaccgccaggtggtgggcttttttttgtcatgaattttgcatggaaccgtgcgaaaagcctctttcggtgttagcgtaacaacaaaagattgttatgcttgaaatatggtgatgccgtacccataacacagggactagctgataatccgtccataaggttacaatcggtacagcaggttttttcaattttatccaggagacggaaatgagttacagcggcgaacgagataactttgcaccccatatggcgctggtgccgatggtcattgaacagaccagtcgcggtgagcgctcttttgatatctattctcgtctacttaaggaacgcgtcatttttctgactggccaggttgaagaccacatggctaacctgattgtggcgcagatgctgttcctggaagcggaaaacccagaaaaagatatctatctgtacattaactccccaggcggggtgatcactgccgggatgtctatctatgacaccatgcagtttatcaagcctgatgtcagcaccatctgtatgggccaggcggccagcatgggcgctttcttgctgaccgcaggggcaaaaggtaaacgtttttgcctgccgaatagccgcgtgatgattcaccaaccgttgggcggctaccagggccaggcgaccgatatcgaaattcatgcccgtgaaattctgaaagttaaagggcgcatgaatgaacttatggcgcttcatacgggtcaaagtttagaacagattgaacgtgataccgagcgcgatcgcttcctttccgcccctgaagcggtggaatacggtctggtcgatagcattctgacccatcgtaattgatgccagaggcgcaactgtgccgctatacttatccagggcggcacaacgctgtaagcggcttgcgcctgagaatggcatttgcgtcgtcgtgtgcggcacaaagaacaaagaagaggttttgacccatgacagataaacgcaaagatggcagtggcaaattgctgtattgctctttttgcggcaaaagccagcatgaagtgcgcaagctgattgccggtccatccgtgtatatctgcgacgaatgtgttgatttatgtaacgacatcattcgcgaagagattaaagaagttgcaccgcatcgtgaacgcagtgcgctaccgacgccgcatgaaattcgcaaccacctggacgattacgttatcggccaggaacaggcgaaaaaagtgctggcggtcgcggtatacaaccattacaaacgtctgcgcaacggcgataccagcaatggcgtcgagttgggcaaaagtaacattctgctgatcggtccgaccggttccggtaaaacgctgctggctgaaacgctggcgcgcctgctggatgttccgttcaccatggccgacgcgactacactgaccgaagccggttatgtgggtgaagacgttgaaaacatcattcagaagctgttgcagaaatgcgactacgatgtccagaaagcacagcgtggtattgtctacatcgatgaaatcgacaagatttctcgtaagagtgacaacccgtccattacccgagacgtttccggtgaaggcgtacagcaggcactgttgaaactgatcgaaggtacggtagctgctgttccaccgcaaggtgggcgtaaacatccgcagcaggaattcttgcaggttgatacctctaagatcctgtttatttgtggcggtgcgtttgccggtctggataaagtgatttcccaccgtgtagaaaccggctccggcattggttttggcgcgacggtaaaagcgaagtccgacaaagcaagcgaaggcgagctgctggcgcaggttgaaccggaagatctgatcaagtttggtcttatccctgagtttattggtcgtctgccggttgtcgcaacgttgaatgaactgagcgaagaagctctgattcagatcctcaaagagccgaaaaacgccctgaccaagcagtatcaggcgctgtttaatctggaaggcgtggatctggaattccgtgacgaggcgctggatgctatcgctaagaaagcgatggcgcgtaaaaccggtgcccgtggcctgcgttccatcgtagaagccgcactgctcgataccatgtacgatctgccgtccatggaagacgtcgaaaaagtggttatcgacgagagcgtaattgatggtcaaagcaaaccgttgctgatttatggcaagccggaagcgcaacaggcatctggtgaataattaaccattcccatacaattagttaaccaaaaaggggggattttatctcccctttaatttttcctctattctcggcgttgaatgtgggggaaacatccccatatactgacgtacatgttaatagatggcgtgaagcacagtcgtgtcatctgattacctggcggaaattaaactaagagagagctctatgaatcctgagcgttctgaacgcattgaaatccccgtattgccgctgcgcgatgtggtggtttatccgcacatggtcatccccttatttgtcgggcgggaaaaatctatccgttgtctggaagcggcgatggaccatgataaaaaaattatgctggtcgcgcagaaagaagctagtacggatgagccgggtgtaaacgatcttttcaccgtcgggaccgtggcctctatattgcagatgctgaaactgcctgacggcaccgtcaaagtgctggtcgaggggttacagcgcgcgcgtatttctgcgctctctgacaatggcgaacacttttctgcgaaggcggagtatctggagagcccgaccattgatgagcgggaacaggaagtgctggtgcgtactgcaatcagccagttcgaaggctacatcaagctgaacaaaaaaatcccaccagaagtgctgacgagcctgaatagcatcgacgatccggcgcgtctggcggataccattgctgcacatatgccgctgaaactggctgacaaacagtctgttctggagatgtccgacgttaacgaacgtctggaatatctgatggcaatgatggaaagcgaaatcgatctgctgcaggttgagaaacgcattcgcaaccgcgttaaaaagcagatggagaaatcccagcgtgagtactatctgaacgagcaaatgaaagctattcagaaagaactcggtgaaatggacgacgcgccggacgaaaacgaagccctgaagcgcaaaatcgacgcggcgaagatgccgaaagaggcaaaagagaaagcggaagcagagttgcagaagctgaaaatgatgtctccgatgagcgcagaagcgaccgtagtgcgtggttatatcgactggatggtacaggtgccgtggaatgcgcgtagcaaggtcaaaaaagacctgcgtcaggcgcaggaaatccttgataccgaccattatggtctggagcgcgtgaaagatcgaatccttgagtatcttgcggttcaaagccgtgtcaacaaaatcaagggaccgatcctctgcctggtagggccgccgggggtaggtaaaacctctcttggtcagtccattgccaaagccaccgggcgtaaatatgtccgtatggcgctgggcggcgtgcgtgatgaagcggaaatccgtggtcaccgccgtacttacatcggttctatgccgggtaaactgatccagaaaatggcgaaagtgggcgtgaaaaacccgctgttcctgctcgatgagatcgacaaaatgtcttctgacatgcgtggcgatccggcctctgcactgcttgaagtgctggatccagagcagaacgtagcgttcagcgaccactacctggaagtggattacgatctcagcgacgtgatgtttgtcgcgacgagcaactccatgaacattccggcaccgctgctggatcgtatggaagtgattcgcctctccggttataccgaagatgaaaaactgaacatcgccaaacgtcacctgctgccgaagcagattgaacgtaatgcactgaaaaaaggtgagctgaccgtcgacgatagcgccattatcggcattattcgttactacacccgtgaggcgggcgtgcgtggtctggagcgtgaaatctccaaactgtgtcgcaaagcggttaagcagttactgctcgataagagtttaaaacatatcgaaattaacggcgataacctgcatgactatctcggtgttcagcgtttcgactatggtcgcgcggataacgaaaaccgtgtcggtcaggtaaccggtctggcgtggacggaagtgggcggtgacttgctgaccattgaaaccgcatgtgttccgggtaaaggcaaactgacctataccggtagcctcggcgaagtgatgcaggagtccattcaggcggcgttaacggtggttcgtgcgcgtgcggaaaaactggggatcaaccctgatttttacgaaaaacgtgacatccacgtccacgtaccggaaggtgcgacgccgaaagatggtccgagtgccggtattgctatgtgcaccgcgctggtttcttgcctgaccggtaacccggttcgtgccgatgtggcaatgaccggtgagatcactctgcgtggtcaggtactgccgatcggtggtttgaaagaaaaactcctggcagcgcatcgcggcgggattaaaacagtgctaattccgttcgaaaataaacgcgatctggaagagattcctgacaacgtaattgccgatctggacattcatcctgtgaagcgcattgaggaagttctgactctggcgctgcaaaatgaaccgtctggtatgcaggttgtgactgcaaaataatgacctcgcgcaaaatgcactaataaaaacagggctggcaggctaattcgggcttgccagcctttttttgtctcgctaagttagatggcggatcgggcttgcccttattaaggggtgttgtaaggggatggctggcctgatataactgctgcgcgttcgtaccttgaaggattcaagtgcgatataaattataaagaggaagagaagagtgaataaatctcaattgatcgacaagattgctgcaggggctgatatctctaaagctgcggctggccgtgcgttagatgctattattgcttccgtaactgaatctctgaaagaaggggatgatgtagcactggtaggttttggtacttttgccgttaaagagcgtgctgcccgtactggccgcaacccgcagaccggtaaagagatcaccatcgctgctgctaaagtaccgagcttccgtgcaggtaaagcactgaaagacgcggtaaactaagcgttgtccccagtggggatgtgacgaagttcaagggcgcatctactgatgtgccttttttatttgtattcggtgactttctgcgtcttgtgggctgacaattgcccccgtttcttgtcacaataggcctttgcgcgcatcgatacgttgcgtgaggtacacagtcatctacagcggagtgttgttacaccatgatggacagcttacgcacggctgcaaacagtctcgtgctcaagattattttcggtatcattatcgtgagcttcatattgaccggcgtgagtggttacctgattggcggaggcaataactacgccgcaaaagtgaatgaccaggaaatcagccgtgggcaattcgagaacgccttcaacagcgagcgtaatcgcatgcagcaacagctgggcgatcaatactccgagctggcagcgaacgaaggctatatgaaaaccctgcgtcaacaggtgctgaatcgtctgatcgacgaggcgctgctggatcagtacgcacgtgagctgaaactgggtatcagcgatgagcaggttaaacaggcgattttcgcgaccccagccttccaggttgacggcaaatttgataacagccgctataacggtatcctcaaccagatggggatgaccgccgatcagtacgcccaggcgctgcgtaaccagctcactacccaacagctgattaacggcgttgccggtaccgattttatgctgaaaggtgaaaccgacgagctggcggcactggtcgcgcaacaacgcgtggtgcgtgaggcgactatcgatgttaacgcgctggcggcgaagcagcctgtgaccgaacaggagattgccagctactacgaacaaaacaaaaacaatttcatgacgccggaacaattccgcgtgagttacatcaagctggatgccgcaacgatgcagcaaccggttagcgatgcggatatccagagctactacgaccagcatcaggatcaattcacccagccgcagcgtacccgctacagcatcatccagaccaaaactgaagatgaagcgaaagcggtacttgatgagctgaataaaggcggtgattttgctgcattagccaaagaaaaatctgccgatattatctctgctcgtaacggcggcgatatgggttggttagaagatgccactatcccggacgaactgaaaaatgctggtctgaaagaaaaaggccaactgtctggtgtcatcaaatctagcgtcggtttcctgattgtacgtctggacgacattcagccagcgaaagtgaaaagcttagacgaagtacgtgacgacattgcggcgaaagtgaaacacgaaaaagccctcgatgcgtactacgcgctgcagcagaaagtgagcgatgcggcaagcaacgacaccgagtctctggccggtgcagagcaagctgccggcgttaaagccactcagacgggttggttcagcaaagataacctgccggaagagttgaacttcaagccggttgccgacgctatctttaacggcggtctggtaggtgaaaacggcgcgccgggcatcaactctgacatcatcaccgtagacggcgaccgcgcattcgtgctgcgcatcagcgagcacaaaccggaagcggtgaaaccgttggcagatgttcaggaacaagttaaggcattggttcagcacaacaaagctgaacaacaggcgaaagtggatgctgagaaactgctggttgatttgaaagccggcaaaggtgcggaagctatgcaggctgccggtctgaaatttggcgagccgaaaaccttaagccgttccggtcgtgacccgattagccaggcggcgtttgcactgccactgccagcgaaagacaaaccgagctacggtatggcgaccgatatgcaaggtaatgtggttctgctggcgctggatgaagtgaaacaaggtagtatgccggaagatcagaaaaaagcgatggtgcagggtatcacccagaacaacgcacaaatcgtctttgaagctctgatgagtaacctgcgtaaagaggcgaaaatcaaaattggcgatgcgctggaacagcaataatcctgaagccgcctcgcaaaaaaatgcgttgcagctgtaacaagaaaaggtcgctttcgcggccttttccatttctgaacattgccatttgtttactgttttcactgccgttaaggtgattccactgttaacaaacaaggagaaaacagtatgaaacacggaattaaagcactgctcattaccctgtccctggcctgtgccggaatgtctcatagcgcgctggcggcagcttctgtggcgaaaccgacggcggtagaaaccaaagcggaagctcctgcagcacaaagtaaagcagcagtaccggcgaaagccagtgacgaagaaggcacccgggtcagcattaataatgccagcgcggaagagctagcccgcgcgatgaatggcgttggcctgaagaaagcgcaggcgattgtcagttatcgcgaagagtacggtccgtttaaaactgtggaggatctaaagcaggtgccggggatgggcaatagcctggtggaacgtaatctggcggtattaaccctgtaattaatttgcatagtggcaattttttgccagactgaagaggtcataccagttatgacctctgtacttataacaacaacgtaaggttattgcgctatgcaaacacaaatcaaagttcgtggatatcatctcgacgtttaccagcacgtcaacaacgcccgctaccttgaatttctcgaagaagcccgctgggatgggttggaaaatagcgacagttttcagtggatgacggcccataacatcgccttcgtcgtggtcaatatcaatattaactatcgtcgcccagcggtattaagtgacctgttaactattaccagtcagttgcagcaattaaacggtaaaagcggcatcttaagccaggtcattacactggagccggaagggcaggtggtagcggatgcgcttattacgtttgtttgtattgatcttaaaacgcagaaagcattagctctggaaggggaattgcgcgaaaagctggagcagatggttaagtaaacgttttgtggtgccggatgctcaagccgcatccggcgacacccggaataattacctcaacccggttttctgcttcatcgctgccatcaccgtcggtttatcggccagataatgattcaaaccgttggcgcgtaaattacatgccgcacaatgaccgcaaccgtcgcctttaaagccgttatagcaggtcaacgtttcgttacggactaaatccagtttgccgtaataatctgccagcgcccaggtttccgctttatcaatccacatcagcggcgtttcaaaacgaatatctttcgccatgcccaaactgacggcatggtttagtgctttcacaaactcatcgcggcaatccgggtagccggagaaatccgtttcgcagacgccagtaattacggcttctgcttttacctgatacgcatatattgccgccagcgtcaggaacaaaatattacgccctgggacaaacgtattcgggataccatcggcttcaggttcataatcaggcaccggaatgctgtcacgcgtcaggctactgaccgccagctcgttgagcagggtgacatccagcaccttatgcgcgcgtgcccccagtttcagcgccagttcgcgtgccacgtcgatttctgcgcgatgccgctgaccgtaatcgaacgtcacgcaatggacttcatcatattgttgtaatgcctgcaccagacaggtggtggaatcctgacctccactgaacacaacgacagcacgtttcatagataatcctgcttgaacaataaaagcgttatggtaacgcctgcgattaacccggaccagctattcattggcttggcgcgggaagccaggcttcggtaaattcaaaccagccgcgcggtgtcagtcgcacaccgttcacgccgggaggggcactaatgcgatagtgatagttgaacagcggcgtcagcgtcgcatctgtcattaactggctaaaaaccgctttcagggcattaaatcggttttcttcatcaggcattatttgcacggcatccagtgtgctttgtagatgtgcgtatgctggagcgtcgaaaacatgtggccacagcggatcgcagcgcagccattgctccagagtatattccggtgcttcgccaattaatctgtcgcccatcatgaggtctgcgtgtgcctgtagggtcgtgtcgtcccagttttttgcgttatgaaaaataattgtgagttcacagccttccgctgccagtgtcgcctgtaggcgttctgccatggtatgaagttctatcggtaggtgataaaccagcgtcaaggttttcggtagtttgacttcatccggtacctgccaatgcggaatagtccagcctggcagtaatgcatgactggcggtgatcaggttttctccgacttctaacgtttgtaataaaccggattgatgaataatggagatcacttttcgcgcctgccagagggagagtcggggacttttgcgcaacgtcaaatagcaaaaacctaaactgatgccgctactgacctggctgacccgttgcagctcctccggtttgccgatggtgatttgcacgggatgccgacaactggttcccaaatctttttcgaaaagcggcggagttatccagtactcaaccgctttaagcagcggatgacgtaaatggtaataatcatggctttccaggcgcaccagctctgctgtgaattgtgttaagcgaaaaggacccgtgccgatcagtgggaattgcggatgcgccagatggctgcaatagctcgccagccggtgcgcaagccagtaatcagggcgatgtaaaaagaaggtcagacactgcggatgggtgacttcaatacgcttcacgctaataaataattgatccagtgctggcagttgtaacagcatcaataatcgctggtgtaagtgactggcttttactgcatcgccgttatgccagtgtagggtactacgaagataaaagtcccagcgtaacccgtcagtagaggtttcccagtgatgcgctaaatcgccaatcgggcgctgagtattattatcgaagcgggtcaggccggaaaatatctgcccggcgagatgctgctcggcacggccgggcaaaaagcctggttgtagcggttcgagcgggcgatagtagggaatacgcaacgtgggtgtatcgttttgccattgtccgcccataaacggctgtaacagagtgcgcagctcacctggggccagttgcgccagctccagcacatcttgctgctttccggtttccagtgcctgttccatcatcgcattgcgtaggctttccggcgtgaccagaaagcgtaattgtccgcgctttccgcgtccactctgcgcctgccactccagccatcccgcctcctgtgcctgacgcaacagcgtacgaacatggcgttcgctgcaaaaacagcgttcggccagttcgctgacggtgacggtttgcggctttccggcggaaggttgccacagacgttgatactggttaagacggttgagcaatcgcatataaacccggaacaatattatttaactattcactattacttccgtatatatcaggtgatactcaatcaccattaaccgtgtcacagagtggagaaagaaatggctcgtctggcagcatttgatatggatggcactttattgatgcccgaccatcatttaggtgagaaaaccctctctactttggcgcgactgcgtgaacgcgacattaccctcacttttgccacggggcgtcatgcgctggagatgcagcatattctcggggcgctaagcctggatgcgtatttgattaccggcaacggaacgcgcgtgcattctctggaaggtgaacttttacatcgtgatgatttacctgcggatgtcgcggagctggtgctgtatcagcaatgggatacccgagccagcatgcatatcttcaatgacgacggttggtttaccgggaaagagatccctgcgttgttgcaggcatttgtctatagcggttttcgttatcagataatcgatgtcaaaaaaatgccactcggcagcgtcaccaagatctgcttctgtggcgatcacgacgatcttacacgcttgcagatccagctatacgaagcattaggcgagcgtgcacatttgtgtttttccgccacggattgcctcgaagtgctgccggtgggctgcaataaaggcgctgcattgacggtgctgacccaacatttaggtttaagcttgcgcgattgcatggcctttggtgatgcgatgaacgatcgcgaaatgttagtcagcgtcggtagcggatttattatgggcaatgcgatgccgcaactgcgcgcggagctcccgcatttaccggtgattggacattgccgaaatcaggctgtctctcactatttgacgcactggctggactatccacatctaccttattcccccgaataacgagatcccttccagcaccgggcaattgcccggttttttttgcgttgaatttgtcattttgtgccgtggtgtttaaaccgcacagaataaattgtcgtgatttcacctttaaaataaaattaaaagagaaaaaaattctctgtggaagggctatgttagataaaattgaccgtaagctgctggccttactgcagcaggattgcaccctctctttgcaggcactggctgaagccgttaatctgacaaccaccccttgctggaagcgcctgaaacggctggaggacgacggtatccttatcggcaaagtcgccctgctggatccggaaaaaataggcctcggcctgaccgcttttgtgctgataaaaacgcaacatcacagcagcgaatggtattgccgctttgtcacggtggttaccgaaatgccagaagtgctggggttctggcgcatggctggtgaatacgattatctgatgcgcgtccaggttgccgacatgaaacgctacgacgagttttataagcgtctggtaaacagcgtgccggggctgagcgacgtcacttccagcttcgcgatggaacagattaaatacaccacttctttacccatcgaataaatatccagaatcaggtcaggacacaacgcgtgcgattatttgctcaattaagctggtatttccgtcgggaatggcgtcgctatctcggggctgtcgccttgcttgtcattatcgcgatgctgcaactggttccgccaaaagtggttggtattgttgtcgatggcgtgacagaacaacactttactaccgggcagatcctgatgtggatcgccaccatggtgctgattgccgttgtggtttatctcctgcgttacgtctggcgggtattgctgtttggtgcgtcttatcaactggctgttgaactgcgtgaagattattaccgtcagctaagccggcagcatcctgagttttacctgcgtcatcgcaccggtgacctcatggctcgtgcgaccaatgacgtcgatcgcgtcgtgtttgccgccggagaaggggtgctgacgctggtggatagtctggtgatgggctgcgctgtgttgattatgatgtctacgcaaattagctggcagttgaccttattttccctgttgccgatgccagtgatggcgatcatgattaagcgcaacggcgatgctttgcatgaacgctttaagctggcacaggcggcgttttccagtcttaatgaccgcacccaggaaagcctcaccagtatccgcatgatcaaagcctttggtctggaagatcgccagagcgcgttatttgccgcggatgccgaagataccggcaaaaaaaacatgcgggtggcgcgtattgatgctcgtttcgacccgaccatctatatcgcgattggtatggcgaacttgctggcgattggcggcggtagttggatggtggtgcagggcagtttaacgctgggccagctcaccagttttatgatgtatttaggtctgatgatttggccaatgctggcgctggcatggatgtttaacattgtggaacgtggtagtgctgcgtacagccgtattcgcgcgatgctggcggaagcgccggtggtgaacgatggtagcgaacccgtgccggaagggcgtggcgaactggatgtaaatattcaccagttcacgtatccgcagactgaccatcctgcgctggaaaacgtcaatttcgccctgaaacccggtcagatgctgggtatctgcgggccgactggttccggcaaaagtaccctgttgagcctcattcagcgtcatttcgacgtcagcgagggggatattcgctttcatgatattcctctgacgaagttacaactcgatagctggcgtagccgcctggcggtagttagccagacgccattccttttttctgacactgtggcgaataacatcgcgctgggttgcccgaatgccacccagcaagagattgagcatgtcgcgcggttagccagcgtacatgacgatattttgcgtctaccgcaaggttacgatacagaggtgggcgagcgcggtgtgatgctttccggcgggcaaaaacagcgtatctccattgctcgtgcgttattagtcaacgcggaaatcctcatccttgatgatgcgcttagcgcggtggacggacgcactgagcaccagatcctgcataacctgcgtcagtgggggcagggaagaacggtaatcatcagtgcccatcgcctttctgcactgacggaagccagtgaaattattgtgatgcagcacggacatatcgcccagcgtggcaatcatgatgtgctggcacaacaaagcggctggtatcgcgatatgtatcgctatcaacaactggaggcggcgctcgacgacgctccggaaaatcgcgaggaggccgtcgatgcgtaactaaaaatcgcgaggaggccgtcgatgcgtagttttagccaactgtggccgactctcaagcgcctgttagcgtacggtagcccgtggcgtaaaccgctggggattgcggtcctgatgatgtgggttgcggcggcggcagaagtcagtgggccgctgcttatcagctattttatcgacaatatggtagcgaaaaataacctgccgttgaaagtggttgcagggctggctgcggcgtatgttgggctgcaactgtttgccgccgggctacattacgcgcagagcctgctgtttaatcgggcggcagtaggcgtagtgcaacagttgcgtaccgacgtgatggatgctgcgttacgccagccattaagcgagtttgatacccaacccgtcgggcaggtgatttcccgcgtcactaatgacactgaagtgatccgcgatctctacgttaccgtagtggcaactgtcctgcgcagtgccgcgctggtgggcgcgatgctggtggcgatgttcagcctcgactggcgaatggcactggtggcgataatgattttcccggtggtgctggtggtaatggtgatataccagcgttacagcacgccgattgtccgtcgtgtgcgcgcctatttggcggatatcaacgacggctttaacgaaatcatcaatggcatgagcgttatccagcagtttcgtcagcaggcgcgatttggcgaacgtatgggggaggccagtcgtagtcactatatggcgaggatgcaaaccctgcgcctcgacggttttctgctgcgtccgctgctgagtctgtttagtagcctcattctttgtggcttgttgatgctgtttggcttctccgccagcggcaccattgaagtgggcgtgctgtatgcgtttatcagctatcttgggcgacttaacgaaccattaatcgaactgaccacgcaacaggcgatgctgcaacaggctgttgttgctggtgagcgcgtgtttgaactgatggacggaccgcgccagcaatatggcaatgatgatcgcccgttacagagtggcaccatcgaagtcgataacgtgagttttgcttatcgcgatgacaatctggtgctaaagaacattaatctctctgtgcctagccgcaattttgtggcgctggtcgggcataccggcagtggcaaaagcaccctcgccagtttattgatgggctattacccgctaacggaaggtgagattcgccttgatggtcgtccattaagtagcctaagtcacagcgcgctgcgccagggcgtggcaatggtgcagcaagatccggtggtgctggcggataccttcctcgccaacgtgacgctggggcgggatatctccgaagaacgcgtctggcaggcgctggaaaccgtgcaactggcggagctggcgcgtagcatgagcgacggtatttacacgccgctgggcgagcaggggaataatctcagtgttgggcaaaagcaactgctggcactggcgcgcgtgctggtcgagacgccgcaaatcctgatccttgatgaggcaaccgccagcattgactccggtactgaacaggcgattcaacatgctctggcggcggtgcgtgaacataccacgctggtagtgattgctcaccgcttaagcaccattgttgatgccgacaccattctggtgcttcatcgtgggcaagccgtggagcagggcactcaccagcaactgctggcggcccagggacgctactggcagatgtatcaactgcaacttgcgggcgaagagctggcagccagcgtgcgtgaagaggaaagtttgagcgcctgaatagcgcaatatttcatcgttggtgcaaaaatgtaacgcactgtgcactgtcatagtgcgttttcattttcaaacttcttaacttcctgctctctttctcgtttttcatttctggcacaccgcttgcaataccttcttcgtgtagcagaaccattaccgaattctgaccggaggggatctatgaagctggtgaccgtgataatcaaaccattcaagctggaagacgttcgtgaagcgttatcttccattggtattcagggcctgaccgtcaccgaagtgaaaggtttcgggcgtcagaaagggcatgccgagctgtaccggggggcggaatacagcgtcaatttcctgccaaaagtaaaaattgatgtggcgattgctgatgaccaactcgatgaagtgatcgatatcgtcagtaaggcggcttacaccggaaaaattggcgacggcaaaatcttcgtcgctgaattgcaacgcgtcattcgtattcgtaccggcgaagccgacgaagcggcgctgtaatctctggcacacagcaacaggaacgaaaaatgaagatagcgacgataaaaactgggcttgctagtctggcgatgcttccgggactggtaatggctgcacctgcggtggccgataaagccgacaatgcgtttatgatgatttgtactgcgctggtgctgtttatgactattccggggattgccctgttttacggtgggttgattcgcggcaaaaacgtgctgagcatgctgacgcaggtgacggtgacatttgcactggtctgtattctctgggtggtttacggttacagcctggcgtttggtgagggcaacaacttcttcggcaacattaactggttgatgctgaaaaacatcgaactgacggcggtgatgggcagcatttatcagtatatccacgtggcgtttcagggaagctttgcctgcattaccgtcggcttgatagttggggcgctggcggaacgaatccgcttcagtgctgtgttgattttcgtggtggtatggctgacgctctcttacattccgattgcgcatatggtgtggggcggtggtttgctggcttctcacggtgcgctggatttcgcgggtggcaccgtggtgcacattaacgccgcaatcgccggtctggtgggcgcgtatctgataggaaaacgcgtgggcttcggtaaagaggcgtttaaaccgcacaacctgccgatggtcttcaccgggactgccattctctatatcggttggtttggctttaacgccgggagtgcgggcacggcgaatgaaatcgcggcactggcatttgtgaatactgtggtcgcaacggcggcggcaattcttggctggatcttcggtgaatgggcgctgcgtggtaagcctagtctgctgggggcgtgttctggcgcgattgccggtctggtcggcgtgacgccagcctgcggctacattggggttggcggcgcgttgattatcggcgtggtagctggtctggcgggcttgtggggcgttaccatgctcaaacgcttgctgcgggtggatgatccctgcgatgtcttcggtgtgcacggcgtttgtggcattgtcggctgtatcatgaccgggatttttgccgccagcagcctgggcggcgtgggcttcgctgaaggtgtgacgatgggccatcagttgctggtacagctggaaagcatcgccattacgatcgtctggtccggtgttgtggcatttatcggctacaaattggcggatctgacggttggtctgcgtgtaccggaagagcaggagcgagaagggctggatgtcaacagccacggcgagaatgcctataacgcgtaacaagcactgcaaaaaacagccggacggttttcacctccggctatttttttaattgtgattacgcatcaccccttcctgaacggtgctggcaaccagtacgccgtcttgggtataaaactcaccgcgcacaaagccacgtgcgctggacgcgctggtgctctccacgctatacagcagccattcattcaaattaaacgggcgatggaaccacatggaatggtcaatggtggcaatctgaatccccggttcgagaaaaccgatgccgtgcggctgtagagctaccggcaggaagttaagatcagaagcgtaaccgagcagatactgatgaacgcgcaggtcatccggcacgctaccatttgcgcggatccacacctgacgatgtggttctgcgacgtgacctttcagtgggttatgaaactccaccggacggacttccagcggacgatcgcagatgaatttatctttcagcactggcggcagcaggtgcgccaggctttgggcgatttgcgtttcgctagggaggccatcaggcgctggcgcggacggcattgttttttgatgttcgaaacccgcttctggtgcctggaaagaggcagtcatataaaaaatcggtttgccgttttgaatagcagcaacccggcgggcgctgaagctgttaccgtcacgcagcgtttcgacatcataaataatcggcttcttactatcgccagggcgaagaaagtagctgtgaaagctatgtaccagccgctcttcagggacggtctcttttgcagcatacaaggcctgacccacgacctggccgccaaacacctggcgtaaacctaaatcttcactctggccgcgaaagagtccttcctcaattttttccagatttaacaatgtcagtaaattttttagcgcctgactcatataactctccagtaacaaagctgccgcagcaagccaaagtgagttgagtataacgcaaatttgctactggtccgatgggtgcaatggtctgaattacgggctaattacaggcagaaatgcgtgatgtgtgccacacttgttgacgttactattttgttaaccactcttccggcgaggaaagttagcccgctggtgcattgataataaggagaaatgaatgaaactcgtgcacatggccagtggtttagcggttgcgattgcgttggcggcttgcgcagataaaagcgcggatattcagacgccagcaccggctgcaaatacgtctattagtgcaacacaacaaccagctatccagcaaccgaatgtctccggtaccgtctggatccgtcagaaagtcgcactgccgcctgatgctgtgctgaccgtgacactttctgacgcgagcttagccgatgcaccgagtaaagtgctggcgcagaaagcggtgcgtactgaaggtaaacagagtccattcagctttgttctgagttttaacccggcagatgttcagccgaacgcgcgtattctgttgagtgcggcgattaccgtgaatgacaaactggtatttatcaccgataccgttcagccggtgatcaaccagggcggaactaaagccgacctgacattggtgccggtacagcaaaccgccgtgccggttcaggccagcggtggcgcaacgactaccgtacctagcactagtccaactcaggtgaatccgtctagcgcagttccagctcctacgcaatattaagcgacgttaaccctctccgcccggagagggttagtagttccagcgataacgctgcaagtcgatttgcccgcttccgcttaccatcacaccttctgccagtaatgcctgtcgctgacgctgtaaatccggtccggttaggctaattgtgccgtggcgattaaccacccggtgccagggtaaggtgctgccttcagggagacgctttaacacaccgcccacctggcgcgcggcgcgggggcttcccgccagtttcgccacatcaccgtaagtggtgacatagccttcgggaatagcggcgacgatttgccagacgcgttggggaaaactatcttctttttccatcttttcttcctgaggtaatttttcagcataatctggaaaaacgccgctgtgaagtcgcattgcgcaagaaaccagcatctggcacgcgatgggttgcaattagccggggcagcagtgataatgcgcctgcgcgttggttctcaacgctctcaatgggggctctgttggttctcccgcaacgctactctgtttaccaggtcaggtccggaaggaagcagccaaggcagatgacgcgtgtgccgggatgtagctggcagggcccccacccatttctgcctcccaccgtttcgtcaaaaaatcccaacatggctaaactttaaccacaactgacgtcgcaagaattgtctggctgcgcagtacgcttcggaggtatgtctgatgaagtatgttgatggttttgtggttgccgttcctgccgataaaaaggatgcctatcgggaaatggccgctaaggctgcgccattgtttaaagagtttggcgcgcttcgtattgtcgaatgctgggccagcgatgtaccggatggcaaagtgaccgattttcgtatggcggtgaaagcggaagagaatgaagaggttgtctttagctggattgaataccctagtaaagaggtccgcgacgctgctaatcaaaagatgatgagcgacccacggatgaaagagttcggcgagtccatgccgtttgacggcaagcgaatgatctatggcggattcgagagtatcatcgacgaataagtagcgtgacgggctgtgcggcgtgccgtcagcccaaaaattcacaaatgttgctcggcccagcgtaagaaatcttctttcggtaatgccttgctgtagagccagccctgaccgtagtgcacgccatgctggcgtaaccactcttcttgtttactggtttcgattccctccgctaccattttcagtttcagtgtttttgccatttcgatgatatgcggcgtgacatttttatattccagcgcatcaacgaaagatttatcgatcttcagaatgtcgacatccagatcctgtaaataacttaaactactataccccgtaccaaaatcatcaagataaatttcatggcccgcctcccggtagcgagaaattatcggggcgctggttttcggatcggcaaactcgcgttcagtgagttcaagcgcgatctgtctgggattaacctgatagtgattgatcatgtcacgcagcaattgcgggattttttcgctggtgagcacgggggattcaagattgatgctaatatgctgctgtggatgctgacgcagccagtcgcccatatcttcaaagacgcttcttataatcagtagcgtcaatggctcagaaaggcccgtttgctgtgccagcggaataaaactatctggactcaaccaactaccgtctgtctgcggccagcgcgccagtgcctcagcaccgacaattttgccattggctaaggagacaatcggctgatagtgcacgcaaatatcacgattttcgatagcatcctgcagccgatgatgcggactctgaatacggcgcaaaatacgcagcacaaacatcgctgccagcaggccaatcaccaacccgagcggtaaccaaataaagacttgccgatgccagcctttctgcaacattttcgtactagcccatgtgatgatgctaatattcatctccggtaagggcaggatatcgtaaatgattccattattttcgatatgctcaccgggtgttttttgtagcctggtaataattccctgagcaatttcatcgctgctggttatgacaacgttatgggcattgccaataatggcggcatcaatttgccaactgctatagggaatgacatcaataaaggaagcggggtcgatcatgacgacataatgtgccgttcccatggcgaccatgtaacggataatgcctaaatcgttatggcttgttaaccagacacgataaccatctttgctaattttacctggctcggggaaggtatcgggcggactttcatgctccagagagctacactggggaacgttgttatcgatataagccacttcctgaatatagcgataactgtaagatacccgacgcatttccatgagatgggcttcgctacaggcagcgccttgccatctttccagctcctgcagcgcatctttcccttgtgtcgccaccttattggctcgaatagcgacgcgggaggaataggtatccagctcttcaataaagcttgtttctacctgctgatgggccagccagatgcttaagccgacaggcagcaatacactaagaatcagtactccgctaataaggccgaccagatgtcgtgttctcaccagcatatccttattaacacagtgtagggaaagtatatctgattgtggaaaaaggctggctggagataaggaggtagagctggtatttcatgaagtgatgggtggaaacgatcattgtcatttgaccaggcgcagagctttacgcctggtatgtaaccctaacttaagatgtactttcggcgcgagcgagggtaaaaatatcgtaaaaagacagttcacctttacggacgatcattttttgcagttgttccttatgaacatccgcgacacgcggagagttcaagatggcttcaaccagcgcggcaggtacaaagcgcgtgttgtaccattcgccgttatagcaaacgcggaaatccagcacgtcgatatcttcatagcggtagcgtgggtagacatcgaaaaagaagaaaccattaagcaggataaataatacaaccagtagccagacagagccactcagcgtttcggactgcaacatcaccgccagggtggcaaaaaaagcaacgtacataccgataaacagccccggatgtttacggataaaactgatactaaagcggggtttgttgtcgcgtttttcgcgggtattcagagactcaatcgtttcggtcagcaggcgttgtatttcggtcatcgtttgccttcgtggtatctgcaactttccagggaacaccctattttaacgtgggaatagtagaggggaagtaacagatctaccacaattttgcataacagttgcgaaaaaccgattacaattttttaattattctggctggattaccgcccacgacaacgttgtccgggacatcttttgtgacaactgcaccactggctaccacgacgttatcaccaatggtcacaccagggttaatgaccgcgcgtccgccaatccagacgttattaccgatggtgacgggtttccccagttcagcaccgctattacgtgctacagggtcgatgggatgtgttgccgtgtagatatgaacgcctggtgccaacatacagttatcaccgatgcgaatagggcagacatcaagcatcacgcaatcgaagttggcgaaaaaattattaccgagaaaaatgttatagccatagtcacagcgaaacgttggctcaatataagcctctgtcacctgaccgaatagatcagcgagaatttgctggcgtaatgtgtgctcttccgccagggaatgattgtatcggtgaataagctgacgagcgcgcaggcgatcgcgagataacgtctcatctgcgctgcgatacaactcaccagcaatcatcttttctttttctgtgctcattactgacctccggttgctgaaaatgcggcaacacagtaagacgaaaagtcagtgaagagaacgttcccattacatctgtgtgataaagatcacatagggtatgtcttcatggcgaaaaagtataaaattcttaataaacagccggttatagctccgaaagcgaattatttattagcgaataaatttccatacactggaagggatcttgtcgtacagtttattcatggtcaattcggcgaggcggtgatctgcggcactgtaaaataccgccagttcattatcacttaattcgtatttatttttctcgataacacgctccagcgtgtcaattgtctggcaacgacgtaaacgcattaaataatcggttttcgttaaaggtttttcggacatacttctacctatggttgtaataattttaacaagataaactcgcaggattctctttcgtcgcattgacaaaacaacggaatagtcgattaccactcttccgccatttctgaagatcctgcatattaataccataactactgaacaacataaaggtgtcatccagatattcgtcgatctgctcaatgagcttattgtcttcattatacttaattttgtaattaagtgcgaaggtcgcaatatgctcaatcagttcattcaactggaggttgatcgcgctggttgggtcgtttacccagccatgattgctttcttcaaggtttgcaaggcagtcatgatacagggtttcacagagaaacttaagctgtgcgatatcatgtcttttgggactgtattcatccataacgcgtccccttcttagcggttgaactaacggacacctttcgggatggaaaaaacttactgacctggacttgccctctcgtttgttagcttaactataagccactctttgcaggttttcatcgcattattacgaaaaattacaattaggaaggaagcgggacaggactcactttttcatactagcactaacccgcagcaggtaaaagcagtttgctcgaactattcataacatttcaggattatcgccagatgaaattggtgacactaataccaggattgctctgaatatgacgtaataaccgaggaatgaataaagaattaccgcaaataattaagaatagcctctaaatgattatggattattaaatctattagcgctacttaatataaattaactaacaatcagtattttttatgaattttatccgtggttaatactggttttcgtatgagatcctgagttggtggttcaattactccttaatgttcgtaggttatgcataaaaaaggccgcttacgcggccttagtgattacacgttgtatcaatgatgatcgacagtatggctgtgctcgatatcttcattcttgcggctaaagcggcggcgaaccaccacaaagaataccggaacgaagaagattgccagtaccgttgcggtcaccatcccgcccattacaccggtacctactgcgttctgcgcgccggaaccagcaccagtactgataaccagcggcataacgccgaggataaacgccaggctggtcatcaggatcggacgtaaacgcatccgcaccgcatcaagcgtcgcttcaatcagacctttaccttctttatccatcaagtctttggcgaattcgacgataaggatcgcgttcttcgcgctcaacccaatggttgtgagcaggcctacctggaagtaaacgtcattggtcaggccacggaaggtggcagccagcaacgcaccgataacccccagcggaacgaccagcataacggagaacggaatgctccagctctcgtacagcgccgccagacacaggaacacgacaatcaagctaatcgcgtacagactaggtgcctggttgccggagagacgttcctgataggacatccccgtccagtcatagccaacaccggtaggcagtttgctcgccagttgttccatcagctccattgcttcaccggtacttttacccggtgccgcctggcctaagatttccatggatggcaggccgttgtaacgttccagacgcgggctaccgtactcccaacgagaagaggagaacgcgctgaatggcaccatctgaccatcagcagcacgaacataccagtcgccgatatcatccggcagcatacggtatttcgcttcactcatgacataaactttcttcacacgaccgcggtcgataaagtcgttcacatagctgccgccccatgcagcgcccagagtggtgttaatgtcgttgatagaaacacccagcgcctgcgctttttcctggtcgatatcaatcttaaactgcggggtatcttccagaccgtttggacgtacgctggtcaacatatcagggtgcttcgctgcttctgcaagcaactggttacgcgcctgagtcagtttttcgtgaccaaggccagcctggtcaatcagctcaaagtcaaagccggttgcagtacccagttccacgattgcgggcaggttaaaggcgaaaaccatcgcatctttgatttggctgaaagcgcgtgttgcacgcatggtaatcgcttcaactttgttttcttcgcccggacgatcggcccagtccttcaaggaaacgaacgcaataccggtattctgaccacgtcccgcaaagccgaagccgttaacggcgaacacgctctcaacgttgttcttttctttggtcagatagtaatgcgttacctcattgagcactttctgtgtacgttcctgcgttgcacctgctggcagctgaaccatggtcataaacacgccctggtcctcatctggcaagaaggagcttggcagacgcacgaacagataggccatgccgaccacgatgatcagatacagcaccaggtaacgccccgtactgcgcagaataccgcctacgctgtcggtgtagtggtgcgtgctcttctcgaacatgcggttaaaccagccgaagaagccttttttaccttccccgtgatcgcctttggcaatcggtttcagcatggtggcacaaagagctggagtcaggatcaacgccaccagtacgctcagcgccattgcactaacaatggtaatagagaactgacgatagatagcaccagtagaaccgccaaagaaggccatcggtacgaataccgcgctcagtaccatcgcgataccgaccagagcgccctgaatctgccccatgctcttacgggtagcttcttttggcggcaaaccttcttccgccataacacgctcaacgttttctaccacaacgatggcgtcatccaccaacaggccgatggcgagcaccatcccgaacattgttagcgtgtttatgctgaagccaaaggcggcaaggacggcaaaggtcccgagcaataccaccggtacggcaatggtcggaatcaacgtcgcgcggaagttctgcaggaacagatacataaccaggaacacgaggatgatcgcttcgaccagcgttttaaccacttcgtgaatagagattttcacgaacggcgtggtgtcgtatgggtaaacaattttcagaccgctcgggaagaacggttccatcttcgccagttcagcacggattgccgcagcggtatccagcgcgtttgcaccggtcgccagcttgatccccagaccggaagccggttggccgttaaactctgcgatgatgtcgtagttctcaccacccagctcaatcttcgcgacgtcacgcagcagcacgcgggaaccatcctgattcactttcagcaggattttgccgaactcttcagtagaggtcagacgcgtctgagcaataatagaggcgttaagctgttggcctttcaccggcggcgtaccaccgagctgacccgccgcaacctgggcgttctgcgctttgatggcggtaatgacatcaaccggcgttagctggaatttgttcagctcattcgggttcatccagatacgcatcgcgtactgactaccgaacaactgaacatcacccacgccgctcgtacggctgatggcatctttcatattcgccgccacgtagtcggagatatcctcctgcgtcatggtgccatcggtgttgataacgccgacaaccatcaggaagctgctggaacttttctcaacgctcaccccttgctgctgaacttcttgcggcagcaacggcatcgccagctgcagtttgttctgcacctgaacctgcgcgatatccgcatcagtaccagactcaaaggtcagggtgatctgcacggtacccgtggagtcactgttagaggacatgtacatcaggttatcgataccgttcatattctgttcgataacctgtgtcaccgtgtcctgcactgttttcgcatcagcgccggggtaggaggcggagatcgttactgccggcggtgcaatcgtaggatattgcgccaccggcagtttgaggatcgccagcccccctgccaacatgatgataatggcgatcacccacgcaaaaatcgggcgatcgataaagaaattaggcatgtcttaacggctcctgtttaagttaagacttggactgttcaggctgagcaccgcttgcggcttgctggttattatcagcggtaacttcttgtgcttttacctggacaccaggacgcactttctgcagcccacttattactacgcgatcgcctgctttcagaccttctgtcaccagccacttatcgccaatagcctggcttgcaacgatcggacgggtttccactttgtcatccgcgccaactaccagtacggtggcatcgccacgcggcgtacgggttacgccctgttgcgggactaaaatagcgtttggattaagcccttcttccagacgtgcgcgcacgaacatacccggcagcagagtgtgatccgggttcgggaagatagcgcgtagggtgatagacccagtggtctgatcaacggtaacgtcagagaattccagcgtaccgtcctgcgggaacttaatgccgtcactggtgatcagactcactttggctttgccgttctcttgtttcagcgtgccattcgccagttcctgtttcaggcgcaggaagtcgttgctggactgggtcacatcaacgtagatcggatcaagttgctgcacggttgccagcgcagtcgcctgaccgttctgtaccaatgcgccttccgtcacgttgctcttaccaatgcgaccgctaatcggagaggtgactttggtgtaagccagattgatccgcgcagtttcaacggcagctttcgccgcagttaccgcagcattcgcctgttgcgcatcagccagagcctgatcgtactcttgcttactgatgtactgagtaccgagcagtttctgataacgattcaccgtcaattgcgcgatattggctgcagcctgggctttcgccagatcacctttcgcactgtcgtatgtcgcctgataggtcgcaggatcaatctgatagagagagacacctgcttcgatgtcgctaccttctttgaaattacgcttcaggataatcccgctaacttgaggacgaacttctgcgatccggtaggcactggtgcgacccggaagctcggttgtgatctgcagaggttcagttttgactgttactacgccaacggcgggcatctgctggccaccttgttgggcctgtttgtcgtcacatcctgttagggctaagctgccactgagcatcagaacgaccgccagaggcgtaaaccctctgtttttgttcatatgtaaacctcgagtgtccgatttcaaattggtcaatggtcaaaagttaataaacccattgctgcgtttatattatcgtcgtgctatggtacatacattcacaaatgtatgtaaatctaacgcctgtaaattcacgaacatatggcacgaaaaaccaaacaagaagcgcaagaaacgcgccaacacatcctcgatgtggctctacgtcttttcagtcagcagggggtaagttccaccagcctgggcgagattgcaaaagcagctggcgttacgcgcggtgcaatctactggcattttaaagacaagagcgatttgttcagtgagatctgggaactgagtgaatccaatattggtgaactagagcttgagtatcaggcaaaattccctggcgatccactcagtgtattaagagagatattaattcatgttcttgaatccacggtgacagaagaacggcgtcgattattgatggagattatattccacaaatgcgaatttgtcggagaaatggctgttgtgcaacaggcacaacgtaatctctgtctggaaagttatgaccgtatagaacaaacgttaaaacattgtattgaagcgaaaatgttgcctgcggatttaatgacgcgtcgcgcagcaattattatgcgcggctatatttccggcctgatggaaaactggctctttgccccgcaatcttttgatcttaaaaaagaagcccgcgattacgttgccatcttactggagatgtatctcctgtgccccacgcttcgtaatcctgccactaacgaataaccctgaatctgactccaggatttttcctggacattttcgtcgttgctattctggttcactgcgtcgtgatattcttgcggtttgactttttcaggtcgttcttcaggttcagaaaccttcattcatcatgactatgttccagtattacaaacgaagtcggcattttgtttttagtgcatttattgcttttgtttttgtcttgttatgccagaacacggcgtttgcgcgggcgagtagcaatggtgatctgccgacaaaagcggacctgcaggcgcaacttgacagtctaaataaacaaaaagatctttctgctcaggacaaactggtgcagcaggatctgacagatacattagccaccctcgataaaatcgatcgcataaaagaagagacagttcagctacggcaaaaagtcgctgaagcgccggaaaaaatgcgccaggcgaccgcggcgttaacagcacttagcgatgtcgataacgacgaagaaacgcgcaaaattctgagcacgctgagcttgcgccagctggaaactcgcgttgcccaggcgctggacgatttgcaaaacgcacaaaacgatctggcgtcttataacagccagctggttagcttacagacgcagcccgaacgcgtgcaaaatgcgatgtataacgctagccagcagctgcaacaaattcgcagtcgtctggatgggactgatgtcggcgagacagccttacgtcccagccagaaagtgttaatgcaggcccagcaggcgttgctgaatgcggagattgaccagcagcgtaaaagcctggaagggaacaccgtcttgcaggataccttgcaaaagcaacgtgattacgtgacggcgaacagcgctcgtctggagcaccagttacaactgttgcaagaagcggtaaacagcaagcgcctgactttaaccgaaaaaacggcgcaggaagccgtctccccggatgaagccgcgcgtattcaggctaatccgctggtgaagcaggaactggaaattaaccagcagttaagtcagcgtctgattaccgcgactgaaaacggtaatcagttgatgcagcaaaacattaaagtcaaaaactggctggagcgggcgctgcaaagcgaacgcaatattaaagagcagattgccgtcctgaagggcagcctgctgttgtctcgtatcctttaccagcaacaacaaacgctgcccagcgcggatgaactggaaaacatgaccaaccgcatcgcggatttgcgtctcgaacagtttgaagttaaccagcagcgtgatgcactcttccagagcgatgcgttcgtcaacaaactggaagaaggtcacaccaacgaagtcaacagcgaagttcacgatgcgttattgcaagtggttgatatgcgtcgcgaattgctggatcaactcaacaaacagttgggtaaccagctgatgatggccattaacctgcaaatcaaccagcagcagttaatgagtgtgagcaaaaacctgaaatccatcctgactcagcaaatcttttgggtgaacagtaaccgtccaatggactgggactggatcaaagcgttcccgcaaagcctgaaagatgaatttaagagcatgaaaatcacggtgaactggcaaaaagcctggcccgccgtttttatcgctttcctcgctggtttgccgctgctgttgattgccgggctgatccactggcgtctgggctggctgaaagcgtatcaacaaaaactggcttccgctgtgggttccctgcgtaacgacagccagctcaacacaccaaaagcgatccttatcgacctgatccgtgcgctgccggtgtgcctgattattctcgcggttggcctgattctgttgaccatgcagctcaacatcagcgaactgctatggagcttcagcaaaaaactggcgatattctggctggtgtttggcctgtgctggaaggtactggagaaaaacggcgttgccgtacgtcacttcggcatgccggaacagcagaccagccactggcgtcggcaaattgtccgcatcagtctcgcattgctgcctatccatttctggtctgtggtggcagaactttccccgctgcatctgatggatgatgtgctggggcaagcgatgattttcttcaacctgctgctgattgccttcctggtatggccgatgtgccgcgaaagctggcgtgataaagagagccacaccatgcgactggtcaccattaccgtgctgagcataatcccgattgcgctgatggtgctgactgctacaggctacttctacactacgctgcgtctggcaggacgctggattgaaaccgtttatctggtgatcatctggaacctgctgtaccagacggtactgcgtggcttaagcgtagcggcgcggcgtatcgcctggcgtcgtgcgctggcgcgtcggcagaatctggtgaaagagggcgcagaaggtgctgaaccgccggaagaacccaccattgcactggagcaagttaaccagcagacgctgcgtattaccatgttgctgatgtttgcgctgttcggtgtcatgttctgggcaatttggtccgatttgatcaccgtgttcagctatctcgacagcatcacgctctggcattacaacggcactgaagctggcgctgcggtggtgaaaaacgtcaccatgggcagtctgttgtttgcgattatcgccagtatggtggcctgggcgttgattcgcaacctgcctggtttactggaagtgctggtgctcagccgactgaatatgcgccagggcgcgagctatgccattactaccatccttaactacatcattattgctgttggtgcgatgacggtgttcggaagcctgggcgtctcttgggataaactccagtggctggccgcagcattatccgtaggtcttggttttggtttacaagaaattttcggtaacttcgtctccggtttgatcattctattcgaacgtccggtgcgtattggcgatacggtaaccattggtagcttcagcgggacggtaagtaagatccgtattcgtgcgacaacgattaccgatttcgatcgcaaagaagtgatcatcccgaacaaagcgtttgttaccgagcgtctgatcaactggagcttgactgacactactacgcgtctggtgatccgtctcggcgtggcctatggctccgatctggaaaaagtgcgtaaagtgttactgaaggcggcgactgagcacccaagggtgatgcacgaaccaatgccggaagtcttctttacggcatttggtgccagcacgttggatcatgagctgcgtctgtatgtgcgtgaactgcgtgaccgtagtcgtactgtcgatgagctgaaccgtactatcgatcagctgtgccgtgaaaacgacatcaacattgcctttaaccagcttgaagtgcatctgcacaacgagaagggcgatgaggtgacggaagtaaaacgcgactacaaaggcgatgacccgacgccagcggtagggtaaaaacgaaagggggcaacatttagttgccccgagattgctaacaaagtgcgcgttgttcatgccggatgcggcgtgaccgccttatccggcctacgaaaccgcaagaattcaatatattgcaggagcggtgtaggcctgataagcgtagcgcatcaggcagttttgcgtttgcccgcaaccttaggggacatttagcgaccccatttatttctcacttttccgcctcatcatcgcgcgttaatttcttttcataatcacgctttacaatatccagcgcgcgcagcacggtactggcagggatctgattttcctccagcagcacaatcaaatcgacagccagtttgacatcgtcaggggcattttccagactcatattctctccattgttagcgggttaaacgcgctaacctgttttcgattttttccagcgcatggcggcagcgtgccaggcgcgcttcataggcttccacttcacgatgcagcgtttgctgttccacgagatcggtcacccgcgccagacgggctctgcgttcggcaaccatctcacgtagccgccgctcaaaatcctgatgctgaatacgtttacgctgccagcgggcaattttcggtggtgcactgtcccactcgcgcaaactccaggcggaggcttcacgcgcgatggcttccagttgtgccgccagatgttccgccagccaggccacttgcggcagctgttgctgctcaactgcatgacgaagcgcagccagattatcgcccgcctcgtcgagacaagcctgtagtgttgtcgcacgagtctgaaaaagatgcctgtcgaaacgagcacttagcgtggcgaactgactcaccggggcacaacgctgacgcagcgtagcgagctgtccttccagtttttccagcagcagggcggttttcacgataagacctcaatgaaaatgataattgttatgctaaagtagccactctgtaagctgacaacactcaatatgcaacgaatcattttaatcatcattggctggctggcggtagtgctgggtacgctgggcgtggtattaccggtattaccgacgacgccgtttatcctgctggcggcctggtgctttgcccgttcttccccgcgctttcacgcctggttgctgtaccgcagttggtttggcagctatctacgtttctggcagaaacatcatgcgatgccgcgcggcgtcaaaccgcgggcgattttgcttattttgctcacgtttgccatttctctgtggttcgtccagatgccatgggtgcgcatcatgttgctggtaattctcgcctgtttgcttttctatatgtggcgaattccggtgattgatgaaaagcaagaaaagcactgaagcacaacaatcgcagttgcaattattgcgtacagccagtacattctggcgttttcgagcacaggcgcaggcggtcaaaggttaaacaactgttacttttgatacgtttaaaacgcgccgtgagtaccaccgtaacaagcaggcatacacttatgaccgcgactgcacagcagcttgagtatctcaaaaatagcatcaaaagcattcaggactacccaaaacccggcattcttttccgcgatgtcaccagcttactggaagacccgaaagcttacgctctcagcatcgacttgctggttgagcgttacaaaaatgcgggcattaccaaagttgtcggcaccgaagcgcgtggcttcttgtttggcgctccggtagctctgggtctgggcgttggctttgtaccggtccgtaaaccgggcaaactgccgcgtgaaaccatcagtgaaacttacgacctggaatacggcaccgatcagctggagatccacgttgatgccatcaaaccgggcgacaaagttctggtggtggacgacctgctggcaaccggcggcactatcgaagcgaccgttaaactgatccgtcgtctgggtggtgaagtggctgacgctgcgttcattatcaacctgttcgatctcggcggcgaacagcgtctcgaaaaacagggcattaccagctacagccttgtcccgttcccgggccattaattatcgccagtcttgtgctgcccacgctacggacagcacaagatgtgcattcagcctcgccgttctgacggggctgtgttagcattaccccttcgtgaatccaccttccagcgtttcagagcctgccaatgagttatcaggtcttagcccgaaaatggcgcccacaaacctttgctgacgtcgtcggccaggaacatgtgctgaccgcactggcgaacggcttgagcttagggcgtattcatcatgcttatcttttttccggcacccgtggcgtcggaaaaacctctatcgcccgactgctggcgaaggggctaaactgcgaaaccggcattaccgcgacgccgtgcggcgtgtgcgataactgtcgtgaaatcgagcaggggcgctttgtcgatctgattgaaatcgacgccgccagccgcaccaaagttgaagatacccgcgacctgctggataacgtccagtacgctccggcgcgtggtcgtttcaaagtttatctgatcgacgaagtgcatatgctgagccgccacagctttaacgcactgttaaaaacccttgaagagccgccggagcacgttaagtttctgctggcgacgaccgatccacagaaattgccggtgacgattttgagtcgctgtctgcaatttcatctcaaggcgctggatgtcgagcaaattcgccatcagcttgagcacatcctcaacgaagaacatatcgctcacgagccgcgggcgctgcaattgctggcacgcgccgctgaaggcagcctgcgagatgccttaagtctgaccgaccaggcgattgccagcggtgacggccaggttagtacccaggcggtcagtgcgatgctgggtacgcttgacgacgatcaggcgctgagcctggttgaagcgatggtcgaggccaacggcgagcgcgtaatggcgctgattaatgaagccgctgcccgtggtatcgagtgggaagcgttgctggtggaaatgctcggcctgttgcatcgtattgcgatggtacaacttagccctgctgcacttggcaacgacatggccgccatcgagctgcggatgcgtgaactggcgcgcaccataccgccgacggatattcagctttactatcagacgctgttgattggtcgcaaagaattaccgtatgcgccggaccgtcgcatgggcgttgagatgacgctgctgcgcgcgctggcattccatccgcgtatgccgctgcctgagccagaagtgccacgacagtcctttgcacccgtcgcgccaacggcagtaatgacgccaacccaggtgccgccgcaaccgcaaagtgcgccgcagcaggcaccgactgtaccgctcccggaaaccaccagccaggtgctggcggcgcgccagcagttgcagcgcgtgcagggagcaaccaaagcaaaaaagagtgaaccggcagccgctacccgcgcgcggccggtgaataacgctgcgctggaaagactggctagcgtcaccgatcgcgttcaggcgcgtccggtgccaagcgcgctggaaaaagcgccagccaaaaaagaagcgtatcgctggaaggcgaccactccggtgatgcagcaaaaagaagtggtcgccacgccgaaggcgctgaaaaaagcgctggaacatgaaaaaacgccggaactggcggcgaagctagcggcagaagccattgagcgcgacccgtgggcggcacaggtgagccaacttagcctaccaaaactggtcgaacaggtggcgttaaatgcctggaaagaggagagcgacaacgcagtatgtctgcatttgcgctcctctcagcggcatttgaacaaccgcggtgcacagcaaaaactggctgaagcgttgagcatgttaaaaggtagtacggttgaactgactatcgttgaagatgataatcccgcggtgcgtacgccgctggagtggcgtcaggcgatatacgaagaaaaacttgcgcaggcgcgcgagtccattattgcggataataatattcagaccctgcgtcggttcttcgatgcggagctggatgaagaaagtatccgccccatttgatcgtaagcacagcttacgttcgtcatccttaacgtgattgagagagaaacctatgtttggtaaaggcggtctgggtaacctgatgaagcaagcccagcagatgcaagaaaaaatgcagaaaatgcaggaagagatcgcgcagctggaagtcaccggcgaatctggcgcaggtctggtaaaagtgaccatcaacggtgcacacaactgccgtcgcgtagagatcgacccgagcctgctggaagacgacaaagagatgctggaagacctggtggctgcagcattcaacgacgcagcacgtcgtattgaagaaacgcagaaagaaaaaatggcctctgtatcctccggaatgcagctgccgcctggctttaagatgccgttctgatgcaaaccagcccgctgttaacacagcttatggaagcactgcgctgtctgccgggcgttggcccgaagagcgcgcagcgtatggcgttcacgctgcttcagcgcgatcgtagcggcgggatgcgtctggcgcaggcgctcacccgggcgatgagcgaaatcggccactgcgccgattgccgcactttcaccgaacaggaagtctgtaacatctgtagcaatccgcgtcgtcaggaaaacggtcaaatctgcgtggtggagagtccggcggacatctacgccattgagcagacggggcagtttagtggtcgttattttgtgttgatggggcatctgagtccgctggacggcatcggtccggatgatatcgggcttgatcgtctggaacagcgtctggcagaggaaaaaatcactgaagtgatcctcgccaccaaccccacggttgaaggtgaagctaccgctaactacattgccgagctttgcgcgcaatatgacgtggaagccagccgaatcgctcatggcgttccggttggcggcgagctggaaatggtcgacggcaccacgttgagtcactcccttgccgggcgtcataagattcgtttttaagcaaacgagagcaggatcacctgctctcgcttgaaattattctcccttgtccccatctctcccacatcctgtttttaaccttaaaatggcattattgaggtagacctacatgaaaggacaagaaactcgtggttttcagagtgaagtgaaacagcttctgcacctgatgatccattctctctattccaataaagaaatcttcctgcgtgagcttatctctaacgcctccgatgcggcggacaagctgcgtttccgtgcgctctctaacccggacctgtacgaaggtgatggcgaactacgcgttcgtgtctctttcgataaagacaagcgtacgctgaccatctccgataacggcgtggggatgacccgcgacgaagtgattgaccatctggggactatcgctaaatccggtaccaaaagtttcctcgaatccctgggttctgaccaggcgaaagacagccagctgatcggtcagtttggtgttggtttctactctgcgtttatcgtggccgacaaagtgaccgtgcgtactcgcgcggcaggcgaaaaaccagaaaatggcgtcttctgggaaagcgctggcgaaggtgaatacaccgttgccgacatcaccaaagaagatcgtggtactgaaatcaccctgcatctgcgtgaaggcgaagacgagttcctcgatgactggcgcgtgcgttccatcatcagcaaatactccgaccatatcgcgctgccggtagagatcgaaaaacgcgaagagaaagacggcgaaaccgttatctcctgggagaaaatcaacaaagcgcaggcgctgtggactcgtaacaagagcgaaatcaccgatgaagagtacaaagagttctacaaacacatcgcccacgactttaatgatccgctgacctggagccacaaccgtgttgaaggtaagcaggagtacaccagcctgctgtacatcccgtcccaggctccgtgggatatgtggaaccgcgatcataaacacggcctgaaactgtatgttcagcgtgtgttcatcatggacgacgcagaacagttcatgccgaactatctgcgcttcgtgcgtggtctgattgactccagcgatctgccgctgaacgtttcccgtgaaatcctccaggacagcacggtaacgcgtaacctgcgcaatgcgctgaccaagcgtgtgctgcaaatgctggaaaaactggcgaaagacgacgcggaaaaataccagaccttctggcaacagtttggcctggtactgaaagaaggtccggcggaagatttcgctaaccaggaagcgatcgccaaactgctgcgttttgcttctacccataccgattcttctgcgcagaccgtatctctggaagactacgtttcccgcatgaaagaagggcaggagaaaatctactacatcaccgcagacagctatgcggcagcgaagagcagcccgcacctggaactgctgcgtaagaaaggcatcgaagttctgctgctttccgaccgcatcgatgagtggatgatgaactatctgactgagttcgacggtaaaccgttccagagcgtgtctaaagttgacgagagccttgaaaaactggctgacgaagttgatgagagcgcgaaagaagcggagaaagcactgactccgttcatcgaccgtgtgaaagccctgctcggcgagcgcgtgaaagatgtccgtctgactcaccgtctgaccgatacgccagcgatcgttagcaccgacgcggacgaaatgagcactcagatggcgaaactgttcgctgcggcgggccagaaagtgccagaagtgaaatacatcttcgaactgaacccggatcacgtactggtgaaacgtgcggcagatactgaagatgaagcgaagttcagcgagtgggtagaactgctgctggatcaggcgctgctggcagaacgcggcacgctggaagatccgaacctgtttattcgtcgtatgaaccagctgctggtttcctgatgtaatgccggatgaccttcgtgtcatccggcatttttcttttcatcatctgcactttccgcaaattatctcgccattaaccgtttcagccccaggtgcctttcttgaggcaatcgcctgttggtggtatcgtttatcgctttttcaaaaaattcgacacattttaaggggattttcgcaatgcgtatcattctgcttggcgctccgggcgcggggaaagggactcaggctcagttcatcatggagaaatatggtattccgcaaatctccactggcgatatgctgcgtgctgcggtcaaatctggctccgagctgggtaaacaagcaaaagacattatggatgctggcaaactggtcaccgacgaactggtgatcgcgctggttaaagagcgcattgctcaggaagactgccgtaatggtttcctgttggacggcttcccgcgtaccattccgcaggcagacgcgatgaaagaagcgggcatcaatgttgattacgttctggaattcgacgtaccggacgaactgatcgttgaccgtatcgtcggtcgccgcgttcatgcgccgtctggtcgtgtttatcacgttaaattcaatccgccgaaagtagaaggcaaagacgacgttaccggtgaagaactgactacccgtaaagatgatcaggaagagaccgtacgtaaacgtctggttgaataccatcagatgacagcaccgctgatcggctactactccaaagaagcagaagcgggtaataccaaatacgcgaaagttgacggcaccaagccggttgctgaagttcgcgctgatctggaaaaaatcctcggctaattcgaaagcgcgcacggacagtcccctcgccccctcggggagagggttagggtgaggggaacaggcccgcacaagcaaacttatcagcaatctcaggccggatattcattcggccttttacaaaaacctcaatctgcgctattcctttttctgatttgacctctcacagcaattagttcttcttcctcacttttccgctacaattatcaacaagttgaatcgataagaggcggtaatgcgtcagactaaaaccggtatcctgctggcaaacctgggtacgcccgatgcccccacacctgaagcggtaaaacgctatctgaaacaatttttaagcgacagacgcgtggttgataccagtcggttgttatggtggccattgctgcgcggcgtgattttgccgctgcgcagcccgcgtgtggcgaagctgtatgcctctgtctggatggaaggtggcagcccgctgatggtttacagccgccagcaacagcaggcgctggcacaacgtttaccggagatgcccgtagcgctgggaatgagctacggcagcccaagtctggaaagcgccgtagatgaactcctggcagagcatgtagatcatattgtggtgctgccgctttatccgcaattctcctgttctacggtcggtgcggtatgggatgaactggcacgcattctggcgcgcaaacgtagcattccggggataagctttatacgtgattacgccgataaccacgattacattaatgcactggcgaacagcgtacgcgcttcttttgccaaacatggcgaaccggatctgctactgctctcttatcatggcattccccagcgttatgcagatgaaggcgatgattacccgcaacgttgccgcacaacgactcgtgaactggcttccgcattggggatggcaccggaaaaagtgatgatgacctttcagagccgctttggtcgggaaccctggctgatgccttataccgacgaaacgctgaaaatgctcggagaaaaaggcgtaggtcatattcaggtgatgtgcccgggctttgctgcggattgtctggagacgctggaagagattgccgagcaaaaccgtgaggtcttcctcggtgccggcgggaaaaaatatgaatatattccggcgcttaatgccacgccggaacatatcgaaatgatggctaatcttgttgccgcgtatcgttaaagctgagcggtaaagaactgagcgccgtcgcgaagagcctcgtcggcggttttcatcatccgactataatgcaaaaaggcgtgcagcgtgcctgggtagagtttgaactcacagggctgctgatgcgccgctaacgtctggtaaagcagacggctgtcatccagcagcggatcgaactccgccccggcaataaaacagggcggaacttcgcgagtgagatcattattaaacagacagtaatacgggctctcgcggtccgcgtcgttgcttaaatatgcctcttcgtacatctgcaaatcctgttgcgttaagccatcccagacaccgcccaacagacgacgagtcacggaatcccgtaatccgtaaagcccataccacagcaaaacgcccgcaactttaccgcaatcgatctgtttatcacgcaaccacaacgcactggcgagcgccagcatggcacctgcggaatcaccggcaaagccaatgcgggacatattgatttgataatcctccgcctgctggtggaaataacaacaagcagccacaatttcctctatcgcttgcggaaaacgcgcttcaggactaagggtgtaatcaataccaatcaccgtacattggctgtagcttgccagcaggcgcatgatgcgatcgtgggtatcgagattgccgagaataaaaccgcctccatgcaaataaaatagcgtcgctgggctatctggctgcggacaaaagagacgtgtttccacctgcccatattttgttggaaccatgtaagctctggttgccatttctggagcgcccgcattccagaatcggcgctcaagcgtgtaatactgtcgttgctcagcaatcgttcccgttgcgggccagggcggtaaatccggctgaagagtattcacaacggtcttcatttcagcagaaataaggtccagaacaggtagtttgttttccggcttcatacaaaaactcctttcaaattacgtcattgtaaggaaccactgccatgaaaatgcgatcccgcctgctgatattgaaactggctgcgtctcgcgcgctcccgtcagattgtgttaacattcgccgctcagttaaccacccgtaaaaacaaccatgaaatttcccggtaaacgtaaatccaaacattacttccccgtaaacgcacgcgatccgctgcttcagcaattccagccagaaaacgaaaccagcgctgcctgggtagtgggtatcgatcaaacgctggtcgatattgaagcgaaagtggatgatgaatttattgagcgttatggattaagcgccgggcatagtctggtgattgaggatgatgtagccgaagcgctttatcaggaactaaaacagaaaaacctgattacccatcagtttgcgggtggcaccattggtaacaccatgcacaactacagcgtgctcgcggacgaccgtagcgtgctgctgggcgtcatgtgcagcaatattgaaattggcagttatgcctatcgttacctgtgtaacacttccagccgtaccgatcttaactatctacaaggcgtggatggcccgattggtcgttgctttacgctgattggcgagtccggggaacgtacctttgctatcagtccaggccacatgaaccagctgcgggctgaaagcattccggaagatgtgattgccggagccagcgcactggttctcaccagttatctggtgcgttgcaagccgggtgaacccatgccggaagcaaccatgaaagccattgagtacgcgaagaaatataacgtaccggtggtgctgacgctgggcaccaagtttgtcattgccgagaatccgcagtggtggcagcaattcctcaaagatcacgtctctatccttgcgatgaacgaagatgaagccgaagcgttgaccggagaaagcgatccgttgttggcatctgacaaggcgctggactgggtagatctggtgctgtgcaccgccgggccaatcggcttgtatatggcgggctttaccgaagacgaagcgaaacgtaaaacccagcatccgctgctgccgggcgctatagcggaattcaaccagtatgagtttagccgcgccatgcgccacaaggattgccagaatccgctgcgtgtatatagccacattgcgccgtacatgggcgggccggaaaaaatcatgaacactaatggagcgggggatggcgcattggcagcgttgctgcatgacattaccgccaacagctaccatcgtagcaacgtaccaaactccagcaaacataaattcacctggttaacttatagtagcttagcgcaggtgtgtaaatatgctaaccgtgtgagctatcaggtactgaaccagcatagtcctcgtttaacgcgcggcttgccggagcgtgaagacagcctggaagagtcttactgggatcgttaagttatcgtcggttcgtaggccagataaggcgttcacgccgcatctggcatttggctctcgatgcctgatgcgacgctggcgcgtcttatcatgcctacatatttttcatattttacatccggcaaccaccgtttaccccgtcaccacctcacccgccggtggcgtttccagcagttccagcatggtacgggcgatttcacgctcgcccatcactacctgattcgcaccacgttcggtgatatacgccacttcatcgtcataatgggcgcgggcaataatctcaatatccggatttttcgcgcgggcagatgccacaatctcacccgcttcataaccgttgggaatcgtcaggatcagccattttgcacattccagatgcgccagttgcataatttcttcgttcgccgcattgcccaatactgcgcggaccccgcgctctcgcagctcatcaacacgggttcgactcgtctcaatcaccaccagcggaatatcagaggcgagcaatttctcccccagcaggctgcctacacgaccgtaacccaccagtagcgcatggttgcaaatatccactgggatctgcttctcttcttcgattgcctcttccagcgtctgctcttccagcgtttcggtcttcgccagatatttctccagtagtgcgaacagtaccgggttgagcataatgctcaggatcgcccctgccagtaccaggttttgtccggcctgcggcagtaaattcaatgccattcccagtcccgccaggataaacgcgaactcaccaatctgcgccaggctggcggcgatggttaatgccgtacgttgggagtgaccaaacagtcgcaccaggaaaaatgcggctaagctcttaccaaacagaataatcgccagcgtcgccagcactgccagcggttgctgaatcagaattaacggatcaaacaacatcccgacggagacaaaaaacagcaccgcaaacgcgtcgcgcaatggcagcgtatcgtgggcggcacggtgactcagttcagactcgttcagtaccatcccggcaaagaacgcaccgagtgcaaaggagacatcaaacagctctaccgcaccaaaggcaacccctaacgccagcgccagcacgctcagggtaaacagctcgcgagaaccggttgccgcgctgcgtgccataatccacggcaccagacggcgacctaccagcatcataatggcgataaatgcgatcactttgccgatggtgatccccatatcgactgcaagagtggcaaagcccacatcgccctgttccatcattcctgccactgcgggcagcaacaccagcgtcagaaccattaccaggtcttccacaatcaaccaaccgatggcgatttgcccacgctgactgtcaattaattgccgttcttcaagtgcgcgcagtaacaccacggtactggcggtggaaagacataaaccgaacacgataccggtcattaagctccagcccagcacggcagagagcgccatacccagcagcgtcgccacggctatctgggcgatcgcaccgggaatggcgatggcctttaccgccatcaaatccttcaggctaaagtgcaaaccgacgccaaacatcaacagaatgacgcccagttcagccagttccggggcaagcttggtatcggcaacaaagcccggagtgaatggtcctgccagcacacccgctaacagatatcccaccagaggagaaatacgtagtttattggccagcatgccgaggataaaggcgagcacaaggccgccaacaatggtggtgataagcggggtggcgtgatgcattccgtctccttttcctggtggttattgtccatttttggccgggaaaaccaaaattacaggtaatagtttatgacaatttcattgatgatgttcatgaataattattgaattttgcagaaaaatggaattagctgcaaaaaaagcacggatcggaaaacagaaggcggtttaacagaggaaaggcttatggcgactgtaaaacgatgcagccaaagtttgcctttggctgcaatgaaatcagtctttatgccggttatcaggcaggaatatggtcaacatccccaatagtggcaggaaagcacagattttatagactaactcgatgctggtgtgatcggcgataagccccagaactgccgctcccagacctcccatgccaaaagcaaaaccgaaaaagagtccagaaaccataccgatacgtcctggaagcagctcctgagcgtagaccagaatggcagagaatgcgctagcgaggataaatccaataatcaccgttaaaacccccgtccagtgcaggctggcgtagggtaaaatcagcgtaaacggcgcaacgccgaggatagagccccaaatcacatatttccgcccaattttatcccctacaggcccgccgatcaccgtacctgccgcaacggcaaacaggaaggcaaacagatgaagctgagcattctggatagataatccgaatttttgcatcagataaaaggtgtaatagctgctgatgctcgccatatagaaatatttgctgaaaatgaggattaacagaatgctgaccgccagtacaactttattgcgcggcagtggattgataatcgtcgctttgggttttcctttattcattcggtgctgtgcgctgtaccaacggctgatttgcgccaacaccacgatcgccagcagtgccgcaagcacaaaccaggcaacgttgcctttgccataaggcgcgataatcaccgccgccagcaagggtcccagggaactgccaaagttgccgccgacctgaaagatagattgcgccaggccatgccgcccgccggaagccatacgggccacgcgagaagattccggatgaaagacgctactaccggtaccgaccagcgccgccgccagcagaactgcgccaaaactgcccgccagcgcaagcagcaccagaccgcttaaggtaaagcacatgccaattggcaagctccatggcatcggatatttatcggtccagtagccgaccactggttgcagtaggctagaggcgagctggaaggtgagggttatcatgccaatctgcataaatgtcagagaaaattcactctgaagcagcggataaatcgccagaatcaggctttggatcatgtcgttcagcagatgactgaggctgatagcacctaaaataccaaagcttgttcgggccttggtcgtactcgcagccgcgcccgccacaggctggggttgttcactcattgccataggaaagtcactttttcagggttgcgatgtaaagaatgatcttatttgtgattattaccagactaacatacctgtatgcgtcgtctgaaggaagtctcaacgccgaatacagaatttctaatctggatgcagatttatcttcaccggacgcagacttgtctatgatgtcgcgtcatactatttttcaacacgttgaaatcaggtcagggagagaagtatgaaattattgcagcggggcgtggcgttagcgctgttaaccacatttacactggcgagtgaaactgctctggcgtatgagcaggataaaacctacaaaattacagttctgcataccaatgatcatcatgggcatttttggcgcaatgaatatggcgaatatggtctggcggcgcaaaaaacgctggtggatggtatccgcaaagaggttgcggctgaaggcggtagcgtgctgctactttccggtggcgacattaacactggcgtgcccgagtctgacttacaggatgccgaacctgattttcgcggtatgaatctggtgggctatgacgcgatggcgatcggtaatcatgaatttgataatccgctcaccgtattacgccagcaggaaaagtgggccaagttcccgttgctttccgcgaatatctaccagaaaagtactggcgagcgcctgtttaaaccgtgggcgctgtttaagcgtcaggatctgaaaattgccgttattgggctgacaaccgatgacacagcaaaaattggtaacccggaatacttcactgatatcgaatttcgtaagcccgccgatgaagcgaagctggtgattcaggagctgcaacagacagaaaagccagacattattatcgcggcgacccatatggggcattacgataatggtgagcacggctctaacgcaccgggcgatgtggagatggcacgcgcgctgcctgccggaagcctggcgatgatcgtcggtggtcacagccaagatccggtctgcatggcggcagaaaacaaaaaacaggtcgattacgtgccgggtacgccatgcaaaccagatcaacaaaacggcatctggattgtgcaggcgcatgagtggggcaaatacgtgggacgggctgattttgagtttcgtaatggcgaaatgaaaatggttaactaccagctgattccggtgaacctgaagaagaaagtgacctgggaagacgggaaaagcgagcgcgtgctttacactcctgaaatcgctgaaaaccagcaaatgatcagcctgttaagtccgttccagaacaaaggcaaagcgcagctggaagtgaaaataggcgaaaccaatggtcgtctggaaggcgatcgtgacaaagtgcgttttgtacagaccaatatggggcggttgattctggcagcccaaatggatcgcactggtgccgactttgcggtgatgagcggaggcggaattcgtgattctatcgaagcaggcgatatcagctataaaaacgtgctgaaagtgcagccattcggcaatgtggtggtgtatgccgacatgaccggtaaagaggtgattgattacctgaccgccgtcgcgcagatgaagccagatagtggtgcctacccgcaatttgccaacgttagctttgtggcgaaagacggcaaactgaacgaccttaaaatcaaaggcgaaccggtcgatccggcgaaaacttaccgtatggcgacattaaacttcaatgccaccggcggtgatggatatccgcgccttgataacaaaccgggctatgtgaataccggctttattgatgccgaagtgctgaaagcgtatatccagaaaagcagcccgctggatgtgagtgtttatgaaccgaaaggtgaggtgagctggcagtaatccgaaagtgccggatgtttgcatccggcacaatgcttaatcgcggcgggcgatatcagcaaatttggcatcgaggatctttgccagatcgcctgccgccagttcgatatccagtccgcgcttgccgccggaaacataaatagtggcaaattcttgtgcgggggcgtcgataatcgttggcagacgttttttctgccccagtgggctaatccccccaaccaggtatcccgtgctacgctgcgcgaccatcggatcggccatctcaactttcttggcacccagcgcttttgctacttttttaagatccagttgacctgcgaccggcgtaacggccacggcaaggtgtttcatatcaccgttcactgccaccagcagcgttttgtagacctgatccggattcaaacctaattttttgacgacttcatcgccaaaattggtttcagccggatcgtgctcgtaggtatggatttgaaagctaatcttgtttttttcgagtaatttaactgcgggtgtcatggtaattttcctgccttaaacaaaaaaacgaagcaagcatacgcctgatggcggtccaaaaaaaagagtcatcttgcctaagagtattggcaggatggtgagattgagcgacaatcgagttacaccgtcgcttaaagtgacggcataataataaaaaaatgaaattcctctttgacgggccaatagcgatattggccatttttttagcgcaacatttgcggcaaattcccttctccatacaggtgtagtgcaccgaccgcgaccacatatcgccccggcggcatggcgcgtaatttatcccgccaggcgagatttcgctgatgcatcagcacatcgtacaggctctgactgaacgtattgggcagcgttatatcattattttgcggcggtgcattcagccaccagctcatcatttgttgcagcaaccgtgcgttggtatgccagtgggtcagcgtatcgtccagcagcgccagtcctttgtcagggagctggagcaacatggcaatctggttttcagccccttccagttcaatcacgggtttatgttgttgcttcgccgcctgcaatagctggtaatcgataccgtattctgcccgcagccccagtttttgtgcctgcgtcgcctgaagaaccatcgcgatttgccacagcggttgggtagaaaagagactgggagaaatgcccatctcctggctaatgtgctgcaggttttggagttgctcctcgctaatgcgctcttccagcgcctcgcaggcaggcaaattagcaaaaggcgtatcgctggtggaaacatccgcctcgacgatcagcgcatcggcgtttttgagctttttgagcaaacgggtgggcaggggagccatatcgtggctacccatatgaatactgccaatcagatgaaaatggcgattgccggggagggtgatatcgatggcaggccaggtgtaatgattaccgcgcagcgcggcccaaagcgtttttacccggtacaacagatccatacgacctccctttgtgaaatatcatgctagcgcgcggtgagggatggcgcaaatggagttggagacttgtttaatgtgtttgtatgattcagtatgttcttgcatcgctattcacaaggaagcaacagttaaaaaccatgaaacaggcaacaagaaaaccgacgacacccggagatattcttctctatgaatatctggaaccgctcgatttgaaaatcaatgagttagcagagttgctgcatgttcatcgtaatagcgtcagtgcactgatcaataacaatcgtaaactcactactgagatggcatttcgtctggcgaaagtttttgataccacagtcgatttttggctaaacctccaggcggcggttgatctttgggaagttgaaaacaacatgcgcacccaggaagaattgggacggattgaaacagtggctgaatatttggcacgccgtgaagagcgtgcaaaaaaggtcgcgtaaggccaaaacatcgcttcatctcgtaggccggataaggcgttcacgccgcatccggcatccgagcaccattgcctgatgcgacgcttacccgtcttatcaggcctacaaacttgtgcctgaaccgtaggccggataaggcgtttacgccgcatccggcatccgagcaccattgcctgatgcgacgcttacgcgtcttatcaggcctacaaacctgtgcctgaaccgtaggccggataaggcgtttacgccgcatccggcagtcatgcgtcgatgccaaatgcgccaccctaaagcagcgcatccgcaatgatgtacttattccttcggtttaaaccgcagcaaccggttggcgttactcactacggtaatgctgctgagcgccattgccgctccggcaactaccgggttaagcagtgttccagtgaacggccacaaaataccggcggcgaccggaataccgatactgttgtagataaacgcaccgagcaggttctgcttcatgttgtgcagcgttgcgcgggaaatagcgagcgcatccgcaacgcccatcaggctatggcgcatcagggtaatcgccgcggtttcaatggcaacatcactgccgccacccatcgcaatgccgacatccgcctgagccagcgctggcgcgtcgttaatgccgtcgcccaccattgccacctaacgtccttcactttgcagatgtttgatcgcttcggctttaccgtccggcagcaccccggcgatcacctcatcaatccctgcttctttggcgatcgcattggcggtggttgggttatccccggtcaacatcaccagacgatatcccgctttatgcaggcgttgcagcgccgccacgctatcactacgcaacggatcgcgtactgccagcagggctaccgctttcccgtcaaccgccagcagcacaggcgttgccccttggcttgcctgagcagtaatctccgcttcgatagctttggtaccaacctgttgctcatttaacagcgcctgattgcccagcaataacgcatgaccttcagcttcaccgctcacgcccagcccgcgcaatgtgcggaaaccgttgacctgcggtagctgcatatcacctgctttatcgaggatcgctcgtgccagcggatggctggaaccttgctccagtgccgccgccagacgcaatgcctgcgcttcatcaacatcagcaaatgttttcactgcgacaacctgcggcttcccttcagtcagcgtcccggttttatcgaacactacagtgtcgagtgtactggcgcgttgcagcgcgtcagcgtcccgcaccagcacgccaaactcagccgcccgcccgacgccggaaataatgctcatcggcgtcgccagccccagcgcacacggacaggcaataatcagtaccgtggtggcaatcaccagggtatagacaatctgcggtgccggaccaaagaaataccagattgccgcactgacaagcgcaataaccaccactaccggcacaaatacggcactgattttatccgccagctgaccgatttctggcttgctgctctgggcctggcgcaccatgcgaatgattcgactcagcgtagtatggctgccaaccgcactggcacgaaacagcacactgccgtcctgtaccactgtcccggcatggacgctatcgccttcgcctttttgctgcgggattggttcgcccgtcagcatcgcttcatccagccatgcttcgccctgggtaatctcgccatctaccggcacgcgatcgccggtcgtcaggcgcagcaacatacctggctgcacttctgccagaggcacgcttttttcaccttcgtcagtaaccaggcgtgccgtcggcggggttaaatcgagtaacttttccagcgccttagaagaacgctggcgtgcgcgcgcttccagcatatggccgagattgatcagaccgataatcatcgcgctggcttcgtaataaagatgtcgcgcttccatcgggaaccactgcggccacaggttgacgctcatgctatagagccacgccacgccagtacccagcgccaccagcgtatccatcgtcgccgcaccgttcagcaggcttttccatgcactgcggtaaaaatggccgccggcgaaaaccatcactgccagggttatcaggccgataaccaaccacaggctgcggttgtcagcggtgaccatcatgttatcgccgatcatcccccagaccatcaccgggatacccaccgccagtgcgacaattgcctgccagcggaagcgcttcatcgtagcgacggcggtttcttgctggcgctcgcggcgtttagcgtcatcttcaatcgcttccgcgccgtagcccgctttttccaccgcctgcactaaatcttgtggggaggcactgcccatcaccagcgcagtacgctccgccaggtttacccgtgcctgagtgacgcccggtacgctttgcagcgcattttgtacgcgggtgacacagctggcgcagctcatgccgctcagcagcaactgctggctgtcatcgtcatcggcggtcgctgccggaagcgcctcagaaaccgctgtcagtgcttcgctcgggatactactctccgccagcggtttagcctttgggtggcttacagatgcgtcataacccgcttgtttgatggtttcgatcagctgttctgcactggcagtcccggtaacgtgcgcttcagtgatagacacatccgcctgctcaacatccggacgctgttcaagactttctttcacgcgtttaacgcagtgaccgcaggacaggccgtccagggtcaggtcgatagtttgactcataaaacactcctttaagacagttttgactggctgtgataaaggttaaaccttccagcaaggggaaggtcaagaaattaataaaccaggcgggtaaaagtccgtaaagattaaaaaatcggctcgatttgcatcaggattagacatttatctctttgttttcctgtagttaagttgcgggtgctaagttaaatcaggatgcctgaaaatcggcaccggggtgaggaattacctcccgcatctataaaaaggagttaacaaaagatgttagatgcaaacaaattacagcaggcagtggatcaggcttacacccaatttcacagtcttaacggcggacaaaatgccgattacattccctttctggcgaatgtaccaggtcaactggcggcagtggctatcgtgacctgcgatggcaacgtctatagtgcgggtgacagtgattaccgctttgcactggaatccatcagcaaagtctgtacgttagcccttgcgttagaagatgtcggcccgcaggcggtacaggacaaaattggcgctgacccgaccggattgccctttaacagtgttatcgccttagagttgcatggcggcaaaccgcttagcccactggtaaatgctggcgctattgccaccaccagcctgattaacgctgaaaatgttgaacaacgctggcagcgaattttacatatccaacagcaactggctggcgagcaggtagcgctctctgacgaagtcaaccagagcgaacaaacaaccaacttccataaccgggccatagcctggctgctgtactccgccggatatctctattgtgatgcaatggaagcctgtgacgtgtatacccgtcagtgctccacgctcctcaatactattgaactggcaacgcttggcgcgacgctggcggcaggtggtgtgaatccgttgacgcataaacgcgttcttcaggccgacaacgtgccgtacattctggccgaaatgatgatggaagggctgtatggtcgctccggtgactgggcgtatcgtgttggtttaccgggcaaaagcggtgtaggtggcggtattctggcggtcgtccctggagtgatgggaattgccgcgttcagtccaccgctggacgaagatggcaacagtgttcgcggtcaaaaaatggtggcaagcgtcgctaagcaactcggctataacgtgtttaagggctgatcatgatgaacacggaaggtaataacggtaacaaacctctcggtctatggaacgtcgtttccatcggcattggggcaatggtgggggcggggatcttcgcgctgctggggcaggctgcattgctaatggaagccagcacctgggtcgcctttgcttttggcggtattgtggcgatgttttccggttatgcctatgcgcgtctgggggcgagctatcccagcaatggcggcattatcgacttctttcgtcgcggattaggcaacggcgtctttagcctggcgctcagcttactgtacctgttgacgctggcggtgagcatcgccatggtcgcccgtgcttttggcgcttatgccgtgcagtttttgcatgaaggcagccaggaggagcaccttattttgctctacgcgttggggatcattgcggtgatgacgcttttcaactccttaagcaaccatgcggtagggcggctggaagtgatcctcgtcggcattaaaatgatgatcctgttattgctgattattgccggtgtctggagcctgcaaccggcgcatatttccgtctctgcgccccccagctccggtgcgttcttctcctgtattgggataactttccttgcctatgcgggctttggcatgatggcgaacgcggcggataaagtgaaagatccgcaggtcattatgccacgggcgtttctggtggcgattggcgttaccacgttgctttatatcagcctggcactggttttgcttagcgatgtaagcgcattagagttagaaaaatatgccgataccgccgtagcgcaggctgcttctccgctgctcgggcatgtgggttatgtgatcgtcgtcatcggcgctttactggcgacggctagtgccattaacgcgaacctgttcgccgtgtttaacatcatggacaacatgggcagcgaacgcgaactgccgaagctaatgaataaatccctgtggcggcagagtacctggggcaacattattgtcgtggtgttgattatgctgatgacggcggcactgaatttaggcagtctcgccagcgttgccagcgccacctttttgatttgctacctggcggtgtttgtggtggcgatccgcctgcgtcatgatattcacgccagcttgccgattcttatcgttggtacgttggtgatgttgttggtgatcgttggctttatctacagtctgtggtcccagggtagccgtgcgttgatatggattattggcagtctcttactcagccttattgtggcaatggtcatgaagcgcaataaaaccgtataacatctctctgtgcgcagtacttcctgtattattgtggtggcggtcgatattcgcactggcaaaaaaacgtgcttgaatatctgttgaaaccctttaacaaagcacaggaggcgttgcgcgaacgatgaacatcagcgatgtagcaaaaattaccggcctgaccagcaaagccattcgcttctatgaagagaaggggctggtgacgccgccgatgcgcagcgaaaacggttatcgcacctacacgcagcagcatctcaacgaactgaccttactgcgccaggcacggcaggtgggctttaacctggaagagagcggcgagctggtgaatctgtttaacgacccgcagcggcacagcgccgacgtcaaacggcgcacgctggagaaggtggcggagatcgaacgacacattgaggagctgcaatccatgcgcgaccagctgctggcactggcgaatgcctgccctggcgatgacagcgccgactgcccgattatcgaaaatctctccggctgctgtcatcatcgggcagggtgattaagagctgacggctcggatatgtagggttatcccttctatcgcaatgacttcaacatgcgtacctgcaccgagatcctcgctggcgctgacaggccaactactgtcaccgacgcgcatatgaccgcgcccgttgaccagcggagattccagcacaaaacgtcggccaatcagctgctgcccgcgctggtttaaatgactatcgctgtgcttttgttcgcgcacccgccggctcaaccatttccaccacagccaggcggcgagcagcgtcaggatggcaaacattaccccttgccactcccaacccagcggcaccagccagaccaccaggccggtaatcaccgctgccacgccgctccacaacaaataaccatttccgcccagcatctcggctgccagcagcaaaccgccgagactgagccagaaaatatgtggatgaacgaccattaactccatcatggctgagtccgtttgttggcgctgtctttcaccagctcggcaatcccggcaatgctccccatcaggctgctggcctctaatggcatcatcactactttgctgttactggaggaaccgatctgctgtaacgcttcggtgtatttctgcgctacgaagtagttcaccgcctgaatatcaccggaggcgatagcttcagacaccattttggtggcgcgggcttctgcttcggcggaacgttcacgcgcttcagcctgtaaaaacgcgctctgacgttcgccttccgctttcaggatttggctctgtttttcaccttcggctttgaggatttccgcctgacggatcccttccgcttcaagaatgtaagcgcgtttggtacgttccgctttcatctgcgcgttcatactagagataagctctgccggtgggcgcacgtcgcgaatttcaatacgggtgactttaatcccccacgggttggtggcttcatcgacaatacgcagcaggcgactgttgatgctgtcgcgctgagagagcatttcgtcaagttccatactacccagcacggtacggatgttagtcatggtcaggttgatgatcgccagctccagattgctgacttcataagccgcgcgcggcgcgtcaatcacctgaataaagcacacggcgtcgatggtaacgttggcgttatctttgctgataacttcctgggaagggatatcgagcacttgctccatcatattgatcttgcgaccaatgcgatccataaacggcaccaccagactgagccccggctgtaacgttttggtatagcgaccaaagcgttctactgtccactgatagccctgcggtacgattttgacacccgcgccgacaatgaccagcgcgacaaaaatgagaatcgggataaagataagcatcggaaaaacctcctgttgtaccgtccataatcagcaaaattgctgcttgattaaacaaattatacctgattactgaaagagagttcccccttattcctgcgaaggataaactgtttttagtaaaaatcagaaaaagggaacagcgatgcaggaaaatagtcctttgcttcagctacaaaacgtaggatatctggcgggtgatgcgaagattcttaataacatcaattttagcctgcgtgctggcgaatttaagttaattaccggtccttctggttgtggcaaaagtacgctgctaaaaatagttgctagtttgatcagcccaaccagcggaacgttactgtttgaaggtgaggatgtcagcacactaaagccagaaatctaccgccaacaagtctcttactgcgcccagacaccgacgctgtttggcgatacggtatacgataatctgatctttccctggcagatccgtaaccggcagcctgacccagccatttttctcgattttctcgaacgcttcgccttgccggacagcattttgacgaagaatatcgccgagctatctggtggtgaaaaacaacgcatcagtttgattcgtaacctgcaatttatgccgaaggttttattgctggatgaaataaccagtgcgctggatgaaagtaataaacataacgtcaatgagatgatccatcgttatgtgcgcgagcaaaatattgccgtgctgtgggtgacacacgataaagacgaaattaatcatgcggataaagtgattacactgcaaccgcatgccggagaaatgcaggaagcacgctatgaactcgcataactaaagaaatgcaggaagcacgctatgaacagccataatattactaacgaaagtttagcactggcattaatgctggtggtggtggcaatcttaattagccataaagaaaaactggcgctggagaaaaatattctctggagcgtcgggcgagcgataattcagctgattattgtcggctatgtgctgaagtatattttcagcgtggatgatgccagcctgacattattgatggtgttatttatctgctttaatgcggcgtggaacgcgcaaaaacgcagtaaatatattgctaaagcttttatcagtagctttattgccattacggtcggggcgggaattaccctggcggtgctgattctcagtgggagcattgaatttatcccgatgcaggtgatccctatcgccgggatgattgccggtaacgccatggtagcggtggggttgtgttacaacaatttagggcaacgggtcattagcgaacagcaacagattcaggagaaactgagtcttggtgcgacgccgaagcaggctagtgcgatattgattcgcgacagtattcgcgcggctttaattccgacggtcgatagtgcaaaaacggttggcttagtgagtttaccaggaatgatgtccgggctgatatttgccgggattgatccggtgaaggcgattaaatatcagattatggtgacctttatgctgctcagtaccgccagcttgagcaccattattgcctgctatttaacctatcgtaagttttataatagccgccaccagttggtggtgacgcaattgaagaagaaatgatgcgatgccggatgcgcagcatcgcatccggcgttgtggttcatgtgccgatcaacggaatatcaatacaacaatgcatacagctggcggcgatacttgctcgccagtgcatcacccgtacccagcgcagcgaggatctcctggaacgttttacgcgtctgaccgtctgcggcggtgagatctttacgcagatgcccgaacagcaactccagcgcctcttcattgcgcccaacctgatgcagttgcagcgccagttgcgtcgccagtgcggcatcttctggattctccgccacctgctgttgcaactgttgaatttccggcgtatcagccgcctgcttcagcagttcgatttgcgccaccagcccctggtagcgggtgtcctgatcctgcaacggaatggttttcagcaccgcttccgcatcttcagaacggttcagcgcaatcagcgtttctgccagcagcaggccgatctccccgttctgattgctcaactgccaggcgtctttcagcaatggcagggcatcggtgtaattgctttcctgcatcagttgcatcgcctgctgcgctttcagctcttcttcgcgcggcagcactttatccagcagggcgcggatcgcctcttccggttgcggcccctggaagccatctaccggttgcccgttctggaacagatacacggtcggaatcgcacgcagaccaaactgcgcggcaatcatctgctccgcgtcgcagtccagcttcgccagaataaattgcccgttgtactgcgccgcgaggctttccagaattggggttaactgcaaacagtgctggctacgttcagaccaaaaatagaacagcaccggagtggtcatgctctgttcaagaacctgttgcaggttagattcgttaatgttgacaatattttctacggacatggagtcgctctctgttgtcgatattttctttgacatgggggcttaagcgcgcgcttcaactcacccctgcaatattttgtccatcacgcgccccggcagcaggcgcttaagcaccattaccgcccaggtcaccagcgtcaccggatagcgcatcttcggcttctcgctaataaaagcatggcgtactttgtccaccaccgcttccggtcccaacgtaaagcgggcggcgatgccgggattttcgactggtttatcactttgcgtctggttgacgttgtcggtgaagcgagtacgaatgggaccgggttcgatcaggctgactttaattccgctgtggcgcagctccatgcgcagtgcatcactccacgcctccagcgcatatttactggccgcgtaagcgccacgacccggcgtggagattaatcccatcacgctacttgtcatcacaatacgcccttcaccgtgcggtaacatcgcgggtaacaggcgcatggtgagctggtgtgcgccgaaaaagttggcggaaaactgctgttccatctgcgcacggctgatggtggaaagggggccatacatgccgaatccggcattgttaaagatcccatacagacaattatcggtcagggcgatcacctcgtcggctgcgcgatcaacactttctggactatccagatcgatcaacacgccggtaaatcccatgctgttcatgcgctcaacatcatccggtttccggcaacctgccagcacatgaaaaccctggcgttttaattcgagcgcgctttccaggccaattccactggaacatccggtaattaagacgcttttttgcataactttacctgtcaggatctccgttgctttatgagtcatgatttactaaaggctgcaacttatttaactgtcatgatttactaaaggctgcaactgcttcgccatccagtcggcaataaacggctgggcgtcgcggttgggatgaataccgtcatcctgcatccattgtggcttgaggtagacctcttccataaaaaagggcagcagcggaacatcaaactctttggcgagtttggggtaaatggcgctaaaggcttcattataacggcgaccatagtttgcaggcagacgtatttgcattaacaatggttcagcgttggcggctttgacatcctgcaaaatctggcgcagcgtttgctcggtttgctgtggctgaaaaccacgcaaaccgtcattgccgcccagttcaaccagcacccaacgcggctgatgctgtttcagcagagccggaaggcgcgccagtccttgttggctggtgtcgccgctgatgctggcattaactacgctcgttttactctgccacttatcattcaacaaggcaggccaggccgcgctggcagacattcgatacccggcgctcaggctatcacccagaatcaataacgtgtccgctgcggcggcacggaaggttaacaggaccaggaacaggaagggcaaatgccagcggaaaacattgttgaagttcatcatcttaagaagtccgtcggtcagggggagcatgaactctccatcctcaccggagttgagctggttgtcaaacgtggcgagaccatcgcactggtgggcgagagcggaagcggtaagagtaccttgctggcgatcctcgccgggcttgatgacggcagcagtggcgaagtgagtctggtgggacaaccgctacataatatggacgaagaagcgcgggcaaagttgcgcgcgaagcacgtcggctttgtttttcagagttttatgttaattcctacccttaacgcgctggaaaacgtcgagcttccggctctgctgcgcggtgagagtagcgcggaaagtcgtaacggggcgaaagcgttgctcgaacagttagggctgggtaaacgtctggatcatcttccggcacagctttccggcggtgaacagcaacgagtggcgctggcacgagcctttaatggtcgacctgatgtgctgtttgccgacgaacccaccggcaaccttgaccgccagacgggcgataaaattgccgacctgctgttttccctcaaccgtgaacatggcaccacgttgattatggtgacccacgacctgcaactggcggcacgctgcgaccgctgcttacggctggtgaacgggcagttgcaggaggaagcatgattgcacgttggttctggcgcgaatggcgtagcccgagcctattaattgtctggctggcgctaagcctggcggtggcctgcgtgctggcgctgggcaatatcagcgatcgcatggagaagggcttaagccagcaaagccgtgagtttatggcgggcgatcgggcgttgcgcagtagtcgcgaagtgccgcaagcgtggctggaggaagcgcaaaagcgcggcctgaaagtcggcaagcagctgactttcgccacaatgacctttgcaggcgacacaccgcagctggcgaacgtcaaagcggtggatgatatctacccgatgtatggcgatctgcaaactaatccccctggcctgaaaccgcaggcgggcagcgtattgctggccccacgcctgatggcactgcttaacctgaaaacgggcgacaccattgacgtgggcgatgccaccttgcggattgccggagaagtgattcaggaaccggattccggttttaaccccttccagatggctccgcgtctgatgatgaatctggcggatgtcgataaaaccggagccgtgcagccggggagtcgggtcacctggcgttataaattcggcggcaacgagaaccagctcgacggctatgagaaatggttgttacctcagcttaaacccgaacaacgctggtacggtctggaacaggacgaaggcgcgctggggcgaagcatggaacgcagccaacagttcctgctgcttagcgcgcttctgaccttgctgctggcagtggcagcggtggcggtagcgatgaatcattactgtcgcagtcgctacgatctggtggcgatcctcaaaacgctgggggcagggcgagcgcaactgcgtaagctaatcgtcggtcagtggttgatggtgctgacgcttagtgccgttaccggtggggccataggcctgttgttcgaaaacgtgttgatggtgctgctcaagcccgttctgcctgctgcactaccgccagccagcctctggccgtggctgtgggcgcttggcaccatgacggtcatcagcctgctggtggggctacgaccatatcgcttgttgctggcaacgcagcctttacgcgtattacgtaatgatgtggtagcgaacgtctggccgctgaagttttatctgccgattgtcagtgtggtggttgtgctgctgctcgccggattaatgggtggcagcatgctgctttgggcggtgctggcgggcgcggtagtactggctttgctgtgcggtgtgctgggctggatgctgctgaatgtacttcgccgcatgacgctgaaaagcctgcctctgcgcctggcggttagccgcctgttacgtcagccgtggagtacgttaagtcagcttagcgcatttagcctctcctttatgctgctggcactgctgctggtgttgcgtggcgatctgctcgaccgctggcagcagcagctacctccagaaagcccgaactactttttaattaacatcgccacagaacaggtagcaccgctaaaagcgttcctcgcggaacatcagatagtcccggaaagcttttatccggtggtgcgggcgcggctgacggcgattaacgataagccgacagaaggtaatgaagatgaggcgcttaaccgcgaactcaatcttacctggcaaaatacgcggcccgatcataatccgattgtcgccggtaactggccgccaaaagccgatgaagtgagcatggaagaggggctggcgaaacgcttaaacgttgccctcggtgataccgtgacttttatgggcgatacccaggagttccgcgctaaagtgaccagcctgcgcaaagtggactgggaaagtctgcggcctaatttctattttattttccctgaaggggcattagacgggcaaccgcagagctggcttaccagtttccgctgggagaatggcaacggcatgttgacacaactcaaccgccagttcccgaccattagcctgttagatattggcgcgattttaaaacaggtcggtcaggtgctggagcaggtaagtcgggcgctggaagtgatggtggtactggtcaccgcctgcggtatgttgctgttgctggcacaggtgcaggtgggaatgcgtcagcgtcatcaggagctggtggtgtggcgcacactcggtgcggggaaaaaactgctgcgtaccacgttgtggtgtgagttcgccatgcttgggtttgtttccggcctggtggccgcaattggtgcggaaacggcgctggcagtgttgcaggcgaaagtgtttgattttccgtgggagccagactggcgattgtggattgttctgccgtgcagcggagcgctgctgctgagccttttcggcggctggctgggtgcgcgactggttaagggtaaggcgctgttcaggcagtttgcggggtgatgagagtccctcattaccgcgccttaacccattccgccacttccgcccactcaccgcgaaagacaactttttccgcttttttctcaagctgatagcgatacatcgggtcgtaatattcttcaagtaacggcaccagccaggccagatgaccgtcggtgctgccggtggtgagttgcgttgtcagtgctgcatccagccttgcagccagttcgttatagcgctgtagccccagccgacgcttaatcgcgctaagtccgtgatgcaggtattcgcaatactcctgccagccctgttcgtcgccgtacgcgtgggtaaaatcatgatgcatacgcaagaaatactcttcgttcaggcgctcaagacggatctcaaacggatcttctaccaccgcaatcgccgcctgagtcattcgctcgcgcaggcattccggcaggtgattgctaccgatcatccggctttcgtcttccagcacccacaggcgcaaattctgacgggcgtcggtttttagcatttcggcagccagcaggttttcaaaactcgcctggctaagttgtggttgtaacgtgcgaccaaacgcgctaccgcgatgacgcgccaacccttccagatcaacaccgttcggctgttgctgcactaacagcgttttaccgctgccggtacaaccgccaatcagcactatcggtttttgtgccagttcaatagtcgcctgaatcgcggtctggcgcagtgccttataaccgccttccaccagcggataatcaatccccgctgcatgcaaccagctttgcacaatatgactgcgctgaccgccacgggcgcagcagagaataccttgcggattttgcaggcacgctgcccgccaggcgtccatgcgctgctgacgaatttcacccgccaccagtttatgtcccagcgccagcgctgcgtcactgccttgctgtttatagcaggtgccaacggcggcgcgttcatcgttattcattaacggcagattgatagcggcgggcattgcgccgtgctcaaactcgataggggcgcgaacatcaataatgggcgtatcagcaatcagcagggcacgatagtcctgttccgtgtgtctctcttgcatagttaaaagtgaacctcaaatcagcttgcgcgctattttacgcgccaacgcgcaaggaaacttgatttttaactgcgtgggttgccgaaaatttctaaaaatccgctgatttccggcctgcgctgggtaaacaaggtcacaatatcttctaccgctttgccgctgccaaatttgcgccatgccagactcaatgggctaggagggcgcatcgttgggattacccggctgaccagttgttgattatcgatcatactctggcaaaggctttttggcaaaaaaccaatgccaacgcccgccagatgggcggcgattttcgtttccatatcgggaacaataatctctttttgccctggcaatcgccaggcgacgcgtttggttaaggtgcgggcgctgtcttcaatattgaccgccggaaagcgccgcaactgcgcttctgttagcggctcttcaacgttcgccagcggatgatccgccgccatgacaaagcgccattgcacgcttcctaagggatcaagactaaaggtatttgccagcgcctcagttcccgtgacgccgatagccaggctaaaaccttcgtacaataggctgtcccagacgcccatatagatttgtcgggagatgtgaaactgggtaaaggggtaacgctcattcagccacgccagcaactgggcgacggcctgggggttgtagagcaggttgttgatgacaatattcacctggcgttccacgccatcattcacctgttgcagctcgcttggcatactttccagccagctcagccagtctctggcctgggaaagtagatgctcgccagccgctgtcaacgtcacgctgcgagtcgtacggaaaaacagcgctactccggtattctcttccagaagtttaatgcgataactgatcgtcgccgtggttttacataatcgttctgccgctttactaaaacttcctgtttcagcaaccgcaatgaaagtccgcaaggtttctggatcgaacatcttcaggtatccccttttaaatccgcaagttgcgtgattttcttatcctctgatttatcagtatttttacatgataaccctgttcaatttgtggactaaatctagttttggaaaaatattccaacttttgtattgatgttgttctcttaaggttttagattgcctgttattgaaaccaagctgaccggtcggcggtggttgaacggaattatgttacaaggacaaaaagatgaaacttcaggtattaccgttaagtcaggaagcctttagtgcttatggcgacgtaatcgaaacgcagcaacgggattttttccatattaacaatggcctggtggagcgttaccacgatttggcgctggttgagattcttgagcaagactgtacgcttatcagcattaaccgcgcgcaaccggcgaatctgccgctgaccattcacgaactcgaacgtcatccgctgggtactcaggcctttatcccgatgaaaggtgaggtgtttgtggtggtcgtggcgttaggtgacgacaaaccagacctgagtacgctgcgggcgtttatcaccaacggcgaacagggagtgaattaccatcgtaacgtctggcatcacccacttttcgcctggcagcgcgtcaccgattttctgaccatcgatcgcggcggcagtgacaactgtgatgttgaaagtattcctgaacaggaactctgttttgcgtgacgcctgcaaccgacttgcataagataaactaattgttcattgtttatgctcacttgtaggtcggagttaacgtaggtatgacggaagttagacggcgcggcaggccaggacaggcggagcctgtggcacagaagggcgcacaggcgttagagcggggaattgcgattctgcaatatttggaaaaaagtgggggaagtagcagcgttagcgatatttctctcaatctggatttgccgctctccacgacctttcgcttgctgaaggttttacaggcagcggattttgtctatcaggacagtcaattaggctggtggcatataggattaggtgtctttaacgtcggtgcggcgtacatccataaccgcgatgtcctctccgtcgccgggccgtttatgcgccgcctgatgttactttccggcgaaacggtcaatgtcgcgatccgtaacggcaatgaagcggtattaattggtcagttagagtgtaaaagcatggtcaggatgtgtgcgccactgggcagtcgtctgccactgcatgcttccggtgcgggcaaagcgctgctttatccgctggcggaagaggagttgatgagcatcattctgcaaaccggtttgcagcagtttacgccaactacgcttgtggatatgcccaccttgctgaaggacctggaacaagcgcgtgaactgggctataccgtagataaagaagagcatgttgtaggtctgaattgcatagctagtgcaatttacgatgatgtcggtagtgttgttgccgctatctccatctccgggcctagtagtagactgacagaagatcgttttgtcagtcagggtgagctggtcagagacaccgcccgcgatatcagcacggcgttgggactgaaagcacatccataatgtctgtcgcatcccgctctgcggagcgggtttttttgacaaaatttgaaagttggaaaaattttccaataaatagaggtaggaataaaatggcaaaaatgagagccgttgacgcggcaatgtatgtgctggagaaagaaggtatcactaccgccttcggtgttccgggagctgcaatcaatccgttctacagtgcgatgcgtaagcacggcggtattcgtcacattctggcgcgtcatgtggaaggtgctagccacatggcggaaggttatacccgcgcaacggcagggaatatcggcgtatgtctggggacttccggtcctgcgggcacggacatgatcaccgcgctctattccgcttctgctgattccattcctattctgtgcattaccggccaggcaccgcgcgcccgtctgcataaagaagattttcaggccgtagatattgaagcaattgctaaaccggtcagcaaaatggcggttacagttcgtgaagcggcgctggtgcctcgcgtgctgcaacaggcatttcacctgatgcgttctggtcgtccgggtccggtactggtggatttaccgttcgacgttcaggttgcggaaatcgagtttgatcctgacatgtacgaaccgctgccggtctacaaacctgctgccagccgtatgcagatcgaaaaagctgtagaaatgttaatccaggccgaacgtccggtgattgttgccgggggcggggtaattaatgctgacgcagctgcactgttacaacagtttgctgaactgaccagcgttccggtgatcccaacgctaatgggctggggctgtatcccggacgatcatgaactgatggccgggatggtgggtctgcaaaccgcgcatcgttacggtaacgcaacgctgctggcgtctgacatggtgtttggtatcggtaaccgttttgctaaccgtcataccggcagcgtagagaaatacaccgaagggcgcaaaatcgttcatattgatattgagccgacgcaaattggtcgcgtgctgtgtccggatctcggtattgtctctgatgctaaagcggcgctgacactgctggttgaagtggcgcaggagatgcaaaaagcgggtcgtctgccgtgtcgtaaagaatgggtcgccgactgccagcagcgtaaacgcactttgctgcgcaaaacccacttcgacaacgtgccggtgaaaccgcagcgcgtgtatgaagagatgaacaaagcctttggtcgcgatgtttgttatgtcaccaccattggtctgagtcaaatcgctgcggcacaaatgctgcatgtctttaaagaccgccactggatcaactgtggtcaggctggtccgttaggctggacgattccggctgcgctaggggtttgtgccgctgatccgaaacgcaatgtggtggcgatttctggcgactttgacttccagttcctgattgaagagttagctgttggcgcgcagttcaacattccgtacatccatgtgctggtcaacaacgcttatctggggctgattcgtcagagtcaacgcgcttttgacatggactactgcgtgcaactcgctttcgagaatatcaactccagtgaagtgaatggctacggtgttgaccacgtaaaagtagcggaaggtttaggttgtaaagctattcgggtcttcaaaccggaagatattgcgccagcctttgaacaggcgaaagccttaatggcgcaatatcgggtaccggtagtcgtggaagttattctcgagcgtgtgaccaatattagcatgggcagcgaactggataacgtcatggaatttgaagatatcgccgataacgcagcggacgcaccgactgaaacctgcttcatgcactatgaataagggagataaataatgttacgtttctctgctaatttaagcatgttatttggagaatatgattttctcgcccgttttgagaaagctgcgcagtgtggttttcgcggcgttgaatttatgtttccttatgactacgacattgaagaattaaaacatgtgctggcgagtaataaactcgaacatacgctgcacaatttaccggcgggtgactgggcggcgggggagcgcggtattgcctgtattcctggccgtgaagaagagtttcgggatggcgtagcagcagcgattcgttatgcccgtgcgctgggtaataaaaaaattaactgtctggtcggtaaaacgccggctggtttcagcagtgaacagattcacgcaacgcttgtagaaaacctgcgttatgccgcgaatatgctgatgaaagaagatattttattactgattgaacctattaaccattttgatattcctggtttccatctcaccggaactcggcaggcgctgaaattgattgatgatgttggttgctgcaatttgaaaattcagtatgacatttatcatatgcagcggatggaaggtgaattaaccaacaccatgactcagtgggctgataaaattggtcacctgcaaattgccgataatccgcatcgcggcgaaccgggaaccggagaaattaattatgattatctctttaaggtaatcgaaaattctgactacaacggttgggttgggtgtgaatataaaccccaaaccaccacggaagccggtttacgctggatggatccgtaccgttaaaacgtaacgctattcagacaatgcttttttaggccgctaagttggcaggggatcgtgttgtctgaattcaggaaaagcgaaatttaaaagaggttaattatgaaactgggatttattggcttaggcattatgggtacaccgatggccattaatctggcgcgtgccggtcatcaattacatgtcacgaccattggaccggttgctgatgaattactgagtctgggtgccgtcagtgttgaaactgctcgccaggtaacggaagcaagcgacatcatttttattatggtgccggacacacctcaggttgaagaagttctgttcggtgaaaatggttgtaccaaagccagcctgaagggcaaaaccattgttgatatgagctccatttccccgattgaaactaagcgtttcgctcgtcaggtgaatgaactgggcggcgattatctcgatgcgccagtctccggcggtgaaatcggtgcgcgtgaagggacgttgagcattatggttggcggtgatgaagcggtatttgaacgtgttaaaccgctgtttgaactgctcggtaaaaatatcaccctcgtgggcggtaacggcgatggtcaaacctgcaaagtggcaaatcagattatcgtggcgctcaatattgaagcggtttctgaagccctgctatttgctagtaaagccggtgcggacccggtacgtgtgcgccaggcgctgatgggcggctttgcttccagtcgtattctggaagttcatggcgagcgtatgattaaacgcacctttaatccgggcttcaaaatcgctctgcaccagaaagatctcaacctggcactgcaaagtgcgaaagcacttgcgctgaacctgccaaacactgcgacctgccaggagttatttaatacctgtgcggcaaacggtggcagccagttggatcactctgcgttagtgcaggcgctggaattaatggctaaccataaactggcctgatacccgcaataaaaatggccgatatcagaaaatgaatcggccagcaatattaaaaaagaaagcagccaaagatgttgctagtgtattaaaaataatatttttattttatttgttcctcatagctagattaaaacaacgttatagcatacgtgaaattaagagggatttatggaacatcagagaaaactattccagcaacgcggctatagcgaagatctattgccgaaaacgcaaagccagcggacctggaaaacatttaactattttaccttatggatgggtagcgttcataacgttcccaattatgtgatggtcggcggcttttttattctcggcttgtctacctttagtattatgctggcaattatcctcagcgcctttttcattgccgcggtaatggtattaaacggtgctgcgggcagtaaatacggtgtgccttttgccatgatcctgcgtgcttcttacggtgtacgtggtgcactgtttcccggattattaaggggcggaattgccgccatcatgtggtttggtttgcaatgttacgcggggagtctggcctgcttgattctgattggcaaaatctggccgggatttttaactctcggtggtgatttcactctgttaggcctttctctaccgggcttaattactttcttaatcttctggctggtcaacgttggtataggttttggcggtggcaaagttttaaataaattcactgccattcttaacccgtgcatctatatcgttttcggcggtatggcgatttgggcgattagtctggtcgggatcggtccaatctttgactacattccgagcggtattcagaaagcagaaaacggtggcttcctgttcctggtggtgattaacgcggtagttgcggtctgggcggcaccggcggtgagcgcatccgactttacgcaaaacgcccacagctttcgtgagcaggcgctggggcaaacgctgggtttagttgtggcctatattctgtttgcggtcgccggggtatgtattattgccggagccagtattcactacggcgctgatacctggaacgtgctggatattgttcagcgttgggacagcctgttcgccagcttctttgcggtactggttattctgatgacaactatctccactaacgcgaccggtaatattattccagccggttatcagattgccgccattgcaccgacaaaactgacctataaaaacggcgtactgattgccagtattatcagcttgctgatctgcccgtggaaattaatggaaaatcaggacagcatttatcttttcctcgatattatcggcggaatgcttggtccggtaattggtgtcatgatggcgcattattttgtggtgatgcgcggacaaattaatcttgatgaactgtataccgcacctggcgattataaatattacgataacggttttaacctcactgcgtttagtgtaactctggtggccgttattttatctcttggcggtaagtttattcactttatggaaccgttaagccgtgttagttggtttgtcggcgtcatcgtcgcctttgcggcctacgccttattaaagaaacgtacaacagcagaaaaaacaggagagcaaaaaaccataggttaattaatcccgatattgaacattgagttaaaaaccaatctgtattttacaaggagtttgttatgtcttttgatttaatcattaaaaacggcaccgttattttagaaaacgaagctcgcgttgtagatatcgccgttaaaggcggaaaaattgctgctatcggtcaggatctgggcgatgcaaaagaagttatggatgcgtctggtctggtggttagcccgggcatggttgatgcgcacacccatatttctgaaccgggtcgtagccactgggaaggttatgaaaccggtactcgcgcagcggcaaaaggtggtatcaccaccatgatcgaaatgccgctcaaccagctgcctgcaacggttgaccgcgctagtattgaactgaagttcgatgccgctaaaggcaagctgactattgatgcggcacaactcggtggcctggtgtcttacaacatcgaccgtctgcatgagctggatgaagtgggcgttgtcggcttcaaatgcttcgttgcgacctgtggcgatcgcggtatcgacaacgacttccgtgatgtaaacgactggcagttcttcaaaggtgcgcagaagctgggcgaactgggtcagccggtgctggtgcactgcgaaaacgcgctgatttgtgacgaactgggcgaagaagcgaagcgtgaaggtcgcgtaaccgctcatgactatgtggctagccgtccggtatttaccgaagtggaagcaattcgccgcgtactgtatctggcgaaagttgctggttgccgtctgcacgtttgccacgtcagcagcccggaaggtgttgaggaagtgactcgtgcacgtcaggaaggtcaggacgttacttgtgaatcctgcccgcattactttgtactggataccgatcagttcgaagaaatcggtactctggcgaagtgtagtccgccgatccgcgatctggaaaaccagaaaggcatgtgggaaaaactgtttaacggtgaaatcgactgcctggtttccgaccactctccatgcccgccggaaatgaaagccggtaacatcatgaaagcatggggcggtatcgccggtctgcaaagctgcatggacgtgatgttcgatgaagcggtacagaaacgcggtatgtctctgccaatgttcggcaaattaatggcgactaacgcagcagatattttcggtctgcagcaaaaaggccgtatcgccccaggaaaagatgccgacttcgtcttcattcagccgaatagcagctatgttcttaccaatgacgatctggaatatcgccacaaagtcagcccgtatgttggccgtaccattggcgcgcgtatcacgaaaaccatcttacgtggtgatgtgatttacgacattgaacagggcttccctgttgcgccgaaaggtcaatttatccttaaacatcagcagtaatctggcccctgcaatgcccgtccttgcggcgggcattctccggttaaggtgtgtttatgttcaattttgcagtcagccgcgaaagcctgttaagtggatttcagtggtttttctttattttttgcaacacggttgtggttcctcctacgctactttctgcttttcagttgccgcaaagtagcctgcttacgctcacgcaatatgcttttcttgctaccgcactggcctgcttcgctcaggcgttttgcggtcatcgtcgcgctattatggaagggccaggtggcctgtggtggggaaccatccttactatcacccttggtgaagcaagccgcgggacaccgatcaacgatatcgccaccagcctggcagtggggattgcactctccggcgtgctgacgatgttgattggttttagcggattaggccatcgcctggcacggttatttacgccgagcgtgatggtcttgtttatgttgatgctgggcgcgcagctgaccactatctttttcaaaggtatgctcgggctgccgtttggcatagccgacccgaattttaaaattcagttaccgccgttcgcgctcagcgtggcggtgatgtgcctggtactggcgatgattatcttcctgccgcaacgttttgcccgttatggcctgctggtcggcaccataaccggctggttgttgtggtacttttgctttccttctagccacagcctctccggtgagttgcactggcagtggttcccgctcggcagtggcggtgctttgagcccgggaattattctgacggcggtgattacaggtctggtaaatatcagcaatacctacggtgcgattcggggcacggatgttttttatccgcagcagggcgcagggaatacgcgttatcgtcgtagctttgtggcgaccggatttatgacgctgataaccgtaccgctggcggtaattccatttagtccgtttgttagttccattggtttattaacccagactggcgattacacgcggcgtagctttatttatggcagcgttatttgcctgctggtggcgctggttcctgcactcacgcgactgttttgcagtatccctttacccgtgagtagtgcggtcatgctggtttcttatctgcctttactcttttccgcgctggtgtttagccagcaaataacgtttaccgctcgcaatatttatcgactcgcattgccgttatttgtcggcatatttttaatggcattaccgcctgtgtatctgcaagaccttccattaacgcttcgtcctctgctcagtaacggcttattggtcgggattttactggctgttcttatggataaccttattccgtgggaacgcatcgaataatttgttgaaaaaggattgataatgaagattgtcattgcgccagactcttttaaagagagcttaagtgcagaaaaatgttgtcaggcaattaaagccgggtttagcaccctctttcccgatgcgaactatatctgtttgccgatagcggatggcggcgaagggacggtggatgcgatggtcgccgcgacgggcggcaacatcgtgacgcttgaagtctgcgggccgatgggcgaaaaagtgaatgctttttatggccttaccggcgacgggaaaacggcggtgattgagatggcggcagcaagtggcctgatgctggtcgcgcctgaaaagcgtaatccgttgctggcctccagttttggtacgggggagttaattcgtcatgcgctggataacgacattcgccatattattctcggcattggcggcagtgcgacggtcgacggcggtatgggcatggcgcaggcgctcggtgtgcgtttccttgatgccgacggtcaggcgctggcggcaaacggtggtaatttagcgcgcgtggcaagcattgagatggatgaatgcgatccgcgtctggcgaattgccatattgaagtagcatgtgacgttgataacccgctggtaggggcacgcggcgcggcggcggtgtttggcccgcaaaaaggggcaacgccggagatggtcgaagaacttgaacaggggctgcaaaattacgcccgtgttttacaacagcaaactgaaattaatgtctgccagatggcgggcggcggcgctgcgggcggtatgggtattgcggcggcggtatttctcaatgcggatattaaaccgggcattgaaattgtgttgaatgcggtcaatcttgcgcaggcagtgcagggcgcagcactggtgattaccggggaagggcgcatcgacagccaaacggcaggcggtaaagcgccgctgggtgtggcgagcgtggcgaagcagtttaatgtaccggtgattgggattgctggcgtattgggtgatggcgtggaagtggtgcaccagtacggcattgacgcggtattcagcattttgcctcgtctggcacctttagccgaagtgctcgccagcggtgaaaccaatctcttcaacagcgcgcgaaatattgcctgcgccattaaaataggtcagggaattaaaaactaacccttacctttaaagcggatgcgatttatatcgcataagagtgcagtactcatgccggatgcggcatgagtaccatatccttcctgaaaatcgcgcaaattctatatattgcagagatcatgtaggcctgataagcgaagcgcatcaggcaatgttacaaaaaaagccacggtataaaccgtggcaaaatccaacatagctaaaaataatcaggcgagtggtatgacttaaatctctacgtcgcggttacaatctttgctgtaaatatagctgaacgcttcaccacgccctacaccataaccagcctgtaaagaataagcgcccataaagatgtaatcgccttttttcaccgggatccagttattgtcgaggttataaaccccctgaccggaaagaatataggcaccgtgttcctgaacgtgtgtttcgatataaccgtggctggcacctggtgcaaaagagaggatatgcatgttcatatcaaaacctaactctttgggcagaaaatccagcagaataacatcgtccatgccttcataatgaatgcgttccagttcgctggcattgccagaaaccagccacggtgcatagccttctaccggaacatagcggcgcttatataaaaagatttggctgtcttcggcctgggcgttaacaaacgtcattaaggagcctggcgggcaataaagatagccaccttcgcttaaggcaaatgttttgccttcggctttggcagtgatatttccagagatcacatacaggaacgtttcaatgccttcgccaccgaagccctgttggttgccaccgttttgatgcagtgtgaccagataatcaacaaaagaggcacccagctttggcgtggagaggattgtcgcgtcacaattttcaaagcccggaataatattttttaccagaccatccggggttaacagtgcgaaattaccgtgtttaacaatcgcacggttagccagtaaatcttcgcggtaaccggtgacgttatttaaatatcccatttatgactccttatttctgccaggcaagttgataaagcatgagtgccaacgttttgaccccttcggcaaggtcggtaatattggtgcgttccgccgggttatggctgatcccgttgatgctggggataaaaatcatgcaggttggtacgcgaggcgcgaaaatttgcgcgtcgtgcccggcaccactgtgcatcacccggtaattcagtttttctctttcacacaattctgtcagggtggcgaccagctccttattcatcggcacgggttcttcgtccatccataaatcgatatcaataccaatgtccatttcatcgcaaatcgcccgcatgtcgttttctaactgttgggtgaaatcgcgcagcacggcagcgtcggtatgacgacaatcaatggtgaacgtggttttacccggcaccacatttaccgtattcgggcgcggctctactttgccaaaggtcagaaccagcggatcgcccatccttttcgctttttcgacgctctgatggcaaatgcgactgaaagcgtaaactgtatcacgacgataacccatcggcgtggtgcctgcatggttactttcgccgttcagcgttaccgtataacgacgctgcccgacaattgcattcaccacgccaatactttgcccattactttccagcacacagccctgttcaatatgcagttcaacaaaggctttaatatcctgacgcggagttagtggggcgttcggaagagtaaatccgcaagccttcatcgcatcgacaaaactatttcctttggcatcacagatattccgcacgtcgtcaggattcgccagcccaaaaatatttttactgccccagaagacatacgggaagcggctgccttcttcttctgccatcgccaccacttcgaccgtacgtagcggcgcgccgtattgcgttttcagccagtcaattgccagccacgccgccagcgcgccgaattgcccgtcaaggttaccgccgttaaccacggtatcgatatggctaccgctcagaaccacttcctgtggatattcggtgccattcaggcgaccgtataaattccccacttcatcgaaacgtgtttccagcccgcttgctgccattctttttttaaattgctgctgggtttccagccattccgggctataaagtaaacgggtcatcccacccgctgggtcagcgccaaaagaggaaagccagggcagcgtttcttctatagcttgacggaaatgtgtaatcataagaaagtcctgtctcaataattattgcgcaaagggatttttcgtttcgtaactcgtgttataaagcgcgtcggaaattaaatactggtaaatatcatcaacaatttcgatgccttcgacggcggctttgcgttgtttaatatcctgatcctgtccgggataataaacctgattaaaaccgggcgcgggggtaatggcatttaattcgcgcatggtctggctaagatgttgacggaataattcgctggaggagaaaaagttcggattaataactatatgtaattgccccaaattacgccctgcgtgtaaatcgtcatacatgctactaacctgtcgcccgaacggtaagccgagtaagacgccactgaggacgtcaatcatcatcatcaggccatacccttttggcccggcggcggggagcagagcatgtaccgcgaacggatcggttgttggtacaccgtttttatcgaccgcccaggtatccgggatagacatattacggctgcgggcgtcgagcacttttccccatgcctgtacggtagtcgccatatcaaaggtaaggatctcgtcgccttctcccggcgcggcaaaggccagggggttagtaccgtagtaaatttccgcgccgccaaacggcaccaccattggatcggactggcacatgctaatgccaatgaatccggcgcgggctgcctgctgcacaaaataagagattgcgccgctgtgacccatccggctgataccgaccaccgcaacgccattttgctgggcggttttgatggcatgttccatacccattttcgccgcgacctgtccggcggcattgtcggcatgtaaaattgcgctgcacggcccggtttcctcaagacgaaactccggttcgcggttggtgccgcctttactaatgcgttccgcgtagtattccacgcgcaccgcgccatgagagtggatccctctggcatcggcgtaaaccaatacttcagccacggttgcagcgtgctcacgttttaacccagcctggcagagtttattctcaattagctggtggagtgtttcccgactgattttcatctgtcttcctttttaacgacggtgtgaagcatgactgcaattaacatacagggaaaatatctggattatgtgatccagacaggcaaaaaaatatagttagaatttatttgataatccgctcacttttaacctgatttttaaaacaacaacgcttattaaaaaataatgagtaatagcctggtggttatttgaattcttttgttaataattcctgtgtgatattcatcaccttatttactcgttgtcatcgataccgtaatcgccacattaacactgctcgtgcaattgccatgggtgcaatttttaaggagttgttatgatccacgcctttattaaaaaagggtgttttcaggatagcgtcagtttaatgattattagtcgaaaactcagcgaaagtgaaaatgttgatgatgtttccgtaatgatgggtacgcccgccaataaagcgttattagataccacaggtttctggcatgacgattttaataacgccacgccgaacgatatttgcgtggcaattcgtagcgaagcggcggatgcggggatcgcgcaggcgattatgcagcagcttgaagaggcgctaaaacaactggcgcaggggagtggcagcagccaggcgttgacgcaggtgcgtcgctgggacagtgcctgtcagaaattacccgatgccaatctggcgctgattagtgtggctggcgagtatgcggcggagctggcaaaccaggcgctggatcgcaacctcaacgtgatgatgttctccgataacgtcacgctggaagatgaaatccaacttaaaacccgcgcgcgggaaaaaggcttgctggtgatggggccggactgcggtacgagcatgattgccggcacaccgctggcttttgctaacgtgatgccggaaggcaatattggcgtcattggcgcttccggtaccgggattcaggagctgtgtagccagattgcgctggcaggggagggaattactcacgcgattggccttggcgggcgcgacctcagccgtgaagtgggcggcatcagtgcgctaacagcgctggaaatgctcagtgcagacgagaaaagcgaagtgctggcatttgttagtaaaccacctgccgaagctgtgcgtctgaaaattgttaatgccatgaaagcaaccggcaaaccgacggtggcgctgtttttaggttataccccggcggtggcccgcgacgagaatgtctggtttgcctccagcctggatgaggccgcacgcctggcttgcctgcttagtcgcgtcacggcgcgacgtaacgcaatagcgcctgtcagcagcggatttatttgcggtttgtataccggcggtacgctggctgccgaagcggcgggattacttgccggacaccttggcgtggaagccgacgatacccatcaacatggcatgatgctggacgccgatagccaccagattattgacctcggcgatgatttctacaccgtcgggcgtccccatccgatgatcgacccaaccttacgcaaccagttaattgccgatctcggcgctaaaccgcaagtgcgcgtgttgctgcttgatgtcgtgattggcttcggtgcgaccgccgatcctgccgccagcctggtgagcgcctggcaaaaagcctgtgccgcgcgtttagataatcaaccactgtatgccattgccacggtgacaggcactgaacgtgacccgcaatgccgcagccagcaaatcgccacgctggaagatgcggggattgcggtcgtgagtagcctaccggaagccaccttgctggcggcagcgttaattcatccgctcagccctgccgcacagcaacacacaccgagtttactggaaaacgtcgccgtgattaacatcggattacgcagctttgcgctggagctacaaagcgccagcaaaccggttgtgcattaccaatggagcccagtcgccggtggcaataaaaaactggctcgtttattagaacgtttgcaataaggggttcccatgtttacatcagtggcgcaagccaatgctgcggttatcgaacaaattcgtcgcgctcgtccacactggctggatgtgcaaccggcttcttcacttatcagcgaactaaacgagggcaaaacactgcttcacgccgggccgccaatgcgctggcaggagatgaccggacccatgaaaggggcgtgcgtgggcgcatgtctgttcgaaggttgggcgaaagatgaagcgcaggcgctggcaatactggagcagggggaagtgaacttcattccttgtcaccatgtgaatgccgtcgggccaatgggcggtattacttctgccagtatgccgatgctggtggttgagaacgtgaccgacggcaaccgggcgtactgcaacctcaacgaaggtatcggcaaagtgatgcgttttggcgcttacggcgaagatgtcctgactcgccatcgctggatgcgcgatgtgttaatgccagtattaagcgcggcgctggggcgcatggagcgcggtatcgatctcacggcgatgatggcgcagggcattacgatgggcgatgagttccatcaacgcaatattgcttcctctgcactgttaatgcgtgcgctggccccacaaattgctcgcctcgatcatgataaacagcacatcgccgaagtgatggatttcctcagcgtgaccgatcagttcttcctcaacctcgcgatggcttactgcaaggcggcgatggatgctggcgcgatgatccgcgcaggcagcatcgtcacggcaatgacccgcaacggcaatatgttcgggattcgggtaagcgggctgggcgaacgctggtttactgcgcctgtaaacactccgcaaggtctgtttttcaccggcttctcgcaggagcaggcgaacccggatatgggcgatagcgcgattaccgaaacctttggtatcggaggtgcggcaatgatcgcagcgcctggcgtaacgcgctttgtcggtgcgggtggcatggaagcggcaagagcggtatctgaagagatggcggaaatttaccttgaacgcaatatgcagttgcagatcccaagctgggattttcagggcgcgtgcctggggctggacattcgtcgcgtggtagaaaccggcattacgccactcatcaataccggtatcgcccataaagaggcggggatcgggcagattggcgcaggcaccgtgcgggcaccgctggcgtgctttgaacaggcgctggaagcactggctgaaagcatgggtattggttgaggaacgcgcaatgacgatcatccatcctctgcttgccagtagtagcgcaccgaattatcgccagtcctggcggttagcgggagtgtggcggcgggcgattaacctgatgacggaaagcggcgaactgttaacgttgcatcgtcagggtagtggtttcggccccggaggatgggtgcttcgccgtgcgcaattcgatgcgttatgcggtggattatgcggcaatgaacgaccacaggttgtggctcaagggattcgcctcgggcgtttcacggttaaacagccacagcgttattgtttgctgcgtattacgccgcctgcgcatcctcaaccacttgcagctgcatggatgcaacgcgcggaggaaaccgggcttttcgggccactggcgttggcggcaagcgatccgctgcctgctgagttacgccagtttcgtcactgttttcaggccgcgctcaatggcgttaagaccgactggcggcactggctgggtaaaggccccggattaacgccgagtcatgatgacacgctgagcggaatgctgctggcggcctggtattatggcgctttagatgcgcgctccggtcgtccgttttttgcctgttccgacaatctgcaactcgttaccacagcggtgagcgtcagttatttacgttatgccgcgcaaggatatttcgccagcccactcctgcactttgttcatgctctgagttgcccgaaacgtaccgctgttgcgattgatagcctgctggcgctggggcatacgagtggggcagatacgctgctggggttctggcttggccaacaattattacaaggaaaaccatgaaaacactggttgtggctcttgggggcaacgccttactccagcgcggtgaggcgctgacggcagaaaatcaatatcgcaatatcgccagtgctgtacccgcgctggcacgcctggcccgttcttatcggttggcgattgttcacggcaacgggccgcaggtggggctgctggcattgcagaatctggcgtggaaagaggtagaaccgtatccgctggatgtgctggttgcggaaagccaggggatgattggctatatgctggcgcagagtttgagcgcacagccgcagatgccgcccgtgacgacggtgctgacgcgcattgaggttagccctgatgatccggcgtttttgcagccagagaaatttattggtccggtttatcagccagaagaacaagaggcactggaagcggcttacggctggcagatgaaacgtgatggtaaatatttgcgccgggtggtggcgtctccgcaaccgcgtaaaattctcgacagcgaagccatcgagttgttgctcaaagaggggcatgtggtgatttgcagtggcggcggcggtgtgcctgtgacggatgacggagcagggagtgaagcagtgattgataaagatctcgccgctgcgttgctcgccgagcagattaatgcagatggactggtgatcctcaccgatgctgatgcggtatatgaaaactggggaacgccgcagcaacgtgccattcgccatgccacaccggatgagttagcgccatttgccaaagccgatggtagcatggggccgaatgtaacggcggtgagtggttatgtcagaagccgtggtaaacccgcgtggattggggcgttaagccgaattgaagagacgctggcgggcgaagcggggacctgtattagcctgtaatcgtaggcattagacatttgtgcctgatgcgacgcttgacgcgtcttatcaggcctacaaccggtgccgcatccggcaattggtgcacaatgcctgatgcgatgcttgacgcatcttatcaggcctacaatgggtaccggatcggtaggccggataaggcgtttacgccgcatccggcaagaatagagcaccagttaaccgaacttactctgcgcccaaatcacgccgctggcatattccggcggcagcagcgggattaaggcttccagcgtcgcagtcagacggcttgtgtcgctgtcggtcaaattcagatgccccactttacgccccggacggacttctttgtcgtaccagtgcagatgcaccagcggcagtttcagccagtcataattcacatcgctaccaatcagattgatcatcacgctcggattattcaccactggttgcggtaacggcagatcggtaatcgcccgcagatgcagctcaaactggctgatgctggcaccgttttgtgtccagtgaccgctgttatgcacacgcggtgccagttcgttgatcaacagaccttgcggggtgacaaaacactccatcgccatcacgcccacatagcccagctcctgcataatcgcgctcagcatctcttcggcttgcgcctgctgctgtgcgttggcctgcggaaaagcgacgctggtgcgcaaaataccgtcctgatgcaggttatgcgtcagcggataaaacacggtgctgccatcaaagccgcgcgcgccaaccaggctcacttcaccagagaagttaatgccctgctcgacaatacattcgccgtaacactctgccggtaactgttcggtttcatttgcgcgtaaacgccattgaccgcgaccgtcataaccaccagtgcgacgcttaacaatcgccagctcacctaaacgatcaaacaccgcaggccactcgctgcgttcggcaagtaactgccacggtgcagtcggcaggtggagcttatcgaaaagctgcttctgagtcagacggtcagcaataatcgggaacacatcgcggttcacaaaggccggatggcgcgccagctcgcgggttaatgcggtttccggccagcgttctatctcagcggtaatcacgctttgttgaaaaggcaccgccgccggttcagcgtccagcccgactggccagacagcaatgcctaacggttcgcctgcctgacgcagcatacggcctaactgcccgttaccgaggacgcaaacctgtttcatgccgcacctcgcgggtccgggttttccagcacttcgtcggtctgggctttgcgccagtcattcagacgctggtgcagttctttatcatgagtcgcaagaatttgtgctgccagtaacgccgcgtttgccgcgccagctttaccaatcgccagcgtacccaccggaatgccgcgcggcatttgtacgatggagtagaggctatcgacaccgctcagtgcggcgctctgtactggcacgcccagcaccggcaccagcgttttggcggcaatcatgcctggcagatgcgctgcgccgcctgcgcccgcaataatcacctgataaccgttctcttcggcgctttcggcgaagctgaacagtttatcgggggtgcggtgagcagaaaccacttcaacgtggtgcgggacattcaggatttcgaagatttcggcggcgaactgcatggtagcccagtcgcttttggaccccatcacgatggcgacacgcgccggattattgcgggaagacatgcgtcttaaaactcctgtggtgcacaactctcggctttagagggcacagagaatagcacggaaagagagcaaggaaaacggttgcgtggctgtgaaatcagcaaagttgcgggttttttaaaacggaaaatgaatcagctcaacgtcatccgccgtgactttcaccatactaccttccgtatgccaggcacccagtaccacgcgaaaagcaggttgctgattggcgataagttcatgcaccgccgggcgatgggtatgcccgtggatcagccattgcacctgatgtttttccatcgcactgaccaccgcgttttggttaacgtccatgatcgccaggcttttactgctgttggcttctttgctgttcgcgcgcattcgcgcggcaatgcgtttgcgcacaaacaacggcagggcgaggaatagcgtctgcagccagggtttgtggaccttggcgcgaaaagcctgataacccgcgtcatcggtgcacagcgtgtcgccatgcataatcaacacccggcgaccataaagttcgagcaccttttcttccggcaataacgtcatgccactttcacgggcaaagcgtttgccgagcagaaaatcacggttgccatgaatgaaataacagggaacgccggaatcggacaccgctttgatcgccgccgccatcttgcgatggagtgggttgggatcgtcgtcgccaatccatgcttcaaacagatcgccaagaatatacagcgcgtcggccttgcgggcttcccccgctaaaaaacgcagaaaaccggcggtgatcgccggttcttccacgcagagatgaagatctgcaataaagagtgtcgccacgattactcgctaacggtcacgctttcaatgataacgtcttcttttggcacgtcctggtgcataccgctacgaccggttgcaacacctttgattttgtctaccacgtccatgccgtcaaccacttcagcaaacacgcagtagccccaaccttgcaggctttcgccagagaagttcaggaagtcgttatcaaccacgttgatgaagaactgtgcagttgcagagtgcggagcctgagtacgtgccattgccagcgtaccacgggtatttttcaggccgttgttggcttcgtttttgatcggttctttggtggctttttgtttcatgcccggttcaaaaccgccgccctgaatcataaagccgttgataacacggtggaaaatggtgttgttgtaaaaaccttcgcggcagtagtccaggaagtttttaactgtttcaggtgctttatcgtcaaaagttttgatgacaatatcgccgtgattggtgtggaaagtaaccatttttgcatcctgttccgtttgattggtgcttcaacccagttcgggtcatatatagggtggtgttatagcataaccgcacgatcggatcatcacgcaatgtatgctgattcgcgcgggaaatatgggtattatacgcaactcaattacccacacatgtctaaacggaatcttcgatgctaaaaatcttcaatactctgacacgccaaaaagaggaatttaagcctattcacgccggggaagtcggcatgtacgtgtgtggaatcaccgtttacgatctctgtcatatcggtcacgggcgtacctttgttgcttttgacgtggttgcgcgctatctgcgtttcctcggctataaactgaagtatgtgcgcaacattaccgatatcgacgacaaaatcatcaaacgcgccaatgaaaatggcgaaagctttgtggcgatggtggatcgcatgatcgccgaaatgcacaaagattttgatgctttgaacattctgcgcccggatatggagccgcgcgcgacgcaccatatcgcagaaattattgaactcactgaacaactgatcgccaaaggtcacgcttatgtggcggacaacggcgacgtgatgttcgacgtcccgaccgatccaacttatggcgtgctgagccgtcaggatctcgaccagctgcaggcaggcgcgcgcgttgacgtggtcgacgacaaacgcaacccaatggacttcgttctgtggaagatgagcaaagagggcgaaccgagctggccgtctccgtggggcgcgggtcgtcctggctggcacattgaatgtagcgcaatgaactgcaagcagctgggtaaccactttgatatccacggcggcggtagtgacctgatgttcccgcaccacgaaaacgaaatcgcgcagtccacctgtgcccatgatggtcagtatgtgaactactggatgcacagcgggatggtgatggttgaccgcgagaagatgtccaaaagcctgggtaacttctttaccgtgcgcgatgtgctgaaatactacgacgcggaaaccgtgcgttacttcctgatgagcggccactatcgcagccagttgaactacagcgaagagaacctgaagcaggcgcgtgcggcgctggagcgtctctacactgcgctgcgcggcacagataaaaccgttgcgcctgccggtggcgaagcgtttgaagcgcgctttattgaagcgatggacgacgatttcaacaccccggaagcctattccgtactgtttgatatggcgcgtgaagtaaaccgtctgaaagcagaagatatggcagcggcgaatgcaatggcatctcacctgcgtaaactttccgctgtattgggcctgctggagcaagaaccggaagcgttcctgcaaagcggcgcgcaggcagacgacagcgaagtggctgagattgaagcgttaattcaacagcgtctggatgcccgtaaagcgaaagactgggcggcggcggatgcggcgcgtgatcgtcttaacgagatggggatcgtgctggaagatggcccgcaagggaccacctggcgtcgtaagtaattgcgctattgccggatgcgagttttcgcatccggttatcgtctgcgccaccacaacattcccatcagtagcatccccggcaaccacacccacatcaattcagaaataatcacctgatgcccgtacggcgtggtgtaacgagacaatgcaaacggcgcgacttttatcacctgccagggagcgaaaaagcgttcatcactccacggccacagccagccaacgcctttaccgccagtggttacgctatccagcaagctgtggcttagcaagctgacggttaaaaacagccagcagcgaatcagcccagccctgaaccatcggcgtccaataaacacacataacagcgggacaacaaacgcaaacaccaggctatgggtaaacccgcgatgaccaaaaacattgccgtaagcaacgccaaatttaaagctcaatacgtcggcgtcgggcagcatcgccaggatgattccggcaaataacagacgcggagggatgactttgctacccaaccctaaaccaatgcataggggaacggcggcgtgcgtaataacggttggcatgatggtcgcttcggcaaaatgtcgatgctatcagcatggatgaacggggcgtagagggcaaaagtctgaaaagagaaccggcctgttgatacaggccgggaaagggatcaggcaacaacctgtacgctgtgacctgcaaaactcactgtctgaccggcgacgattttgcagcgtttgcgcgtttcaaccgcaccgtcgactttcacctggccttcggcaatcgcgattttcgcctgcgcgccgctttcgctccagccttccagtttcagcaagtcgcacagctcaacgtgcggatgtttacctaaagaaaatgtcgccatgttactcatcctgtggatcatgatattcaacgcacgcctgtagcgtgttttcaatcagcgtggcaaccgtcatcgggccaacgccgccgggaacaggcgtaatgtaactggcgcgtttagccgcgtcttcaaacacgacgtcgcccacaactttgccattttccagacggttgatgccgacatcaatcacaattgcgccttctttgatccagtcaccgggaataaagcctggcttgccaacggcaacgatcaatagatcggcattttctacgtgatgacgcagatttttagtgaagcggtgagtcactgtagtggtgcaacctgccagcagcagttccatgctcatcgggcggccaacgatattgcttgcgccaatcaccacggcgttgaggccgaaggtatcaatgttgtaacgctcaagcagcgtgacgataccgcgcggggtgcagggacgcagacgcggcgcgcgctggcacagacgaccgacgttgtaaggatggaaaccgtccacgtctttgtccggatgaatacgttccagcactttgacgttatcaatacccgccggtaacggcagttgaaccagaatgccatcgatggtgttgtcggcattcagcgtatcgataagctccagcagctccgcttcgctggtggtttccgggaggtcataagagcgggagacgaacccgacttcttcacaagccttgcgtttgcttgcgacataaatttggcttgcagggttactacccaccagcacaacggccagtcctggtgcccgcagtccggctgcaatacgcgcctgaactttttgagcaacttcagagcgcacctgctgcgcaatcgttttaccgtcaataatctttgctgccatcagagagaggattccatctgttacgtagatcgaaggggatgcgcctattttgtcagaagcggggcgcgctgtcaggtttcgtttcagatttatcgcgtgaagcgacctcttgcgaaggtgaggcgcaccgtcgctgagactgaaagcttcatttttcgtccatgatggcgttgtaaatctggaactgatttatttccttgtctaaggattaagataatttaagaaatacctgacaatataaaaagaattttcagcctggtaatttaccgcttcaggtctatatttgtgttgaatatattttgcgcggaagtattcatctaacggggctctctattttttagaatagagtgcatattttcaattaagacattcttagaggataaaaaggaatttactactatcagtgtcttaaataaagtaatcggttatatacggatgtggagtcgataaatgagattgaaggaatatatatgaaattaagatttattagctctgcgctggctgccgcactattcgccgctacgggtagttatgctgccgttgtagatggcggtacaattcactttgaaggcgaactggtgaatgctgcctgtagtgtgaatactgacagcgcagaccaggttgtcacactcggtcaatatcgtaccgatattttcaatgctgttggtaatacctctgcattaattccattcaccattcagttgaacgactgcgatcctgttgttgccgctaatgctgccgttgcattttctggtcaggctgatgcaatcaatgataatttattggccattgcatccagtaccaatacaacaacagcaacgggtgtcggtattgaaatacttgataatacatccgcaattctcaaacctgatgggaatagcttcagtaccaaccagaacttgatccccgggaccaacgttcttcatttttctgcacgttataaaggcaccggtacaagtgcaagtgcagggcaagcaaatgctgacgcgacttttattatgagatatgaataatcaaaaccacgttgttttgaattatatatcacgtcttataacaaagtaatgtaccggttgtctgaagcggtatggtggcaatgtaaatcgaaatcatgttcactttgtatcatgccgctttattaaatgaaaagggaatgatgtgttgtaagaaaccaaagcaatcatttctttatattccttatttttgccgtcaggaatacacaaggcgtattaactatgatgactaaaataaagttattgatgctcattatattttatttaatcattagcgccagcgcccatgctgccggagggatcgcattaggtgccacgcgtattatttatcccgctgatgctaaacagactgcggtatggattagaaatagccataccaatgagcgctttctggtcaatagctggattgaaaacagcagcggtgtaaaagaaaagagtttcatcattacaccgccactgtttgttagtgaacccaaaagcgaaaatactttgcgtattatttacaccggtccaccgctggcagcagatcgtgagtctctgttctggatgaatgttaagacgatccctagcgtagataaaaatgcattgaacggcaggaatgttttgcaactggcgattttaagccgcatgaaattatttctccgtccaattcaattacaagaattacccgcagaagcgccggacacactcaagtttagccgatccggtaactatatcaatgttcataatccaagtcctttttatgtcaccctggttaacttacaagtgggcagccaaaagttggggaatgctatggctgcacccagagttaatagtcaaattcccttacccagtggagtgcagggaaagctgaaatttcagaccgttaatgattatggtagtgtaactccggtcagagaagtgaacttaaactaaccgaatcatctgacaatatcagagctaattatgaaaatacccactactacggatattccgcagaggtatacctggtgtctggccggaatttgttatagttctcttgccattttaccctcctttttaagctatgcggaaagttatttcaacccggcatttttattagagaatggcacatccgttgctgatttaagccgctttgagagaggtaatcatcaacctgcgggcgtgtatcgggtggatctctggcgtaatgatgagttcattggtagccaggatatcgtatttgaaagcacaacagaaaatacaggtgataaaagtggtgggttaatgccctgttttaaccaggtacttcttgaacgaattggccttaatagcagtgcatttcccgagttagcccagcagcaaaacaataaatgcatcaatttactgaaagctgtacctgatgccacaattaactttgattttgcagcgatgcgcctgaacatcactattcctcagatagcgttgttgagtagcgctcacggttacattccgcctgaagagtgggatgaaggtattcctgctttactcctgaattataatttcaccggtaacagaggtaatggtaacgatagctatttttttagtgagctcagcgggattaatattggcccgtggcgtttacgcaacaatggttcctggaactattttcgcggaaatggatatcatagtgaacagtggaataatattggcacctgggtacagcgcgccattattccgctgaaaagtgaactggtaatgggagacggcaatacaggaagtgatattttcgatggcgttggatttcgtggtgtacggctttattcttctgataatatgtatcctgatagccagcaagggtttgccccaacggtacgtgggattgcccgtacggcggcccagctaacgattcggcaaaatggttttattatctatcaaagctatgtttcccccggcgcttttgaaattacagatttgcacccgacatctagtaatggcgatctggacgtcaccatcgacgagcgcgatggcaatcagcagaattacacaattccgtatagtacagtgccaattttacaacgcgaagggcgtttcaaatttgacctgacggcgggcgattttcgtagcggtaatagtcagcaaagtagccctttcttttttcagggtacggcactcggcggtttaccacaggaatttactgcctacggcgggacgcaattatctgccaattacaccgcctttttattagggctggggcgcaatctcgggaactggggcgcagtgagcctggatgtaacgcatgcgcgcagtcagttagccgacgccagtcgtcatgagggggattctattcgcttcctctatgcgaaaagcatgaacaccttcggcaccaattttcagttaatgggttaccgctatagcacacaaggtttttatacccttgatgatgttgcgtatcgtcgaatggaggggtacgaatatgattacgacggtgagcatcgcgatgaaccgataatcgtgaattaccacaatttacgctttagccgtaaagaccgtttgcagttaaatgttagtcaaagtcttaatgactttggcagcctttatatttctggtacccatcaaaaatactggaatactagcgatagtgatacgtggtatcaggtggggtataccagcagctgggttggcatcagttatagcctcagttttagctggaatgaatctgtagggatccccgataacgaacgtattgtcggacttaatgttagtgtgcctttcaatgttttgaccaaacgtcgctacacccgggaaaatgcgctcgaccgcgcttatgcctcctttaacgccaaccgtaacagcaacgggcaaaatagctggctggcaggtgtaggtgggaccttactggaaggccacaacctgagttatcacgtaagccagggtgataccagcaataatgggtacacgggcagcgccacggcaaactggcaggccgcttacggtacgctggggggcgggtataactacgaccgcgatcaacatgacgttaactggcagctgtctggcggtgtggtcgggcatgaaaatggcataacgctgagccagcctttaggggataccaatgttttgattaaagcgcctggcgcaggcggtgtacgcattgaaaatcaaactggcattttaaccgactggcgcggctatgcggtgatgctgtatgccacggtttatcggtataaccgtatcgcgcttgataccaatacgatggggaattccatcgatgttgaaaaaaatattagcagcgttgtgccgacgcaaggcgcgttggttcgtgccaattttgatacccgcataggcgtgcgggcgctcattaccgttacccagggcggaaaaccggtgccgtttggaagtctggtacgggaaaacagtaccggaataaccagtatggtgggtgatgacgggcaagtttatttaagtggtgcgccattgtctggtgaattactggttcagtggggagacggcgcgaacagtcgctgcattgcgcactatgtattgccgaagcaaagcttacagcaagccgtcactgttattagcgcagtttgcacacatcctggcagttaaaggaaattatcaataagataatctgcagattattattggcgatggcatgtttgtgtctggcaaacatatcctgggctactgtttgtgcaaatagtactggcgtagcagaagatgaacactatgatctcagtaatatctttaatagcaccaataaccagccagggcagattgttgttttaccggaaaaatccggctgggtaggtgtcagtgcaatttgtccacccggtacgctggtgaattatacataccgtagttatgtcaccaactttattgttcaggaaactatcgataattataaatatatgcaattacatgattatctattaggtgcgatgagtctggttgatagtgtgatggatattcagttccccccgcaaaattatattcggatgggaacagatcctaacgttagccaaaaccttccattcggggtgatggattctcgtttaatatttcgtttaaaggttattcgtccctttattaacatggtggagatccccagacaggtgatgtttaccgtgtatgtgacaagtacgccttacgatccgttggttacacctgtttataccattagttttggtggccgggttgaagtaccgcaaaactgcgaattaaatgccgggcagattgttgaatttgattttggtgatatcggcgcaagcttatttagtgcggcagggccgggtaatcgacctgctggtgtcatgccgcaaaccaagagcattgcggtcaaatgtacgaatgttgctgcgcaggcttatttaacaatgcgtctggaagccagtgccgtttctggtcaggcgatggtgagcgacaatcaggatttaggttttattgtcgccgatcagaacgatacgccgatcacgcctaacgatctcaatagcgttattcctttccgtctggatgcagctgcggcagccaatgtcacacttcgcgcctggcctatcagtattaccggtcaaaaaccgaccgaagggccgtttagcgcgctggggtatttacgcgtcgattatcaatgaggtacggagaatgagaagagtactctttagctgtttctgcgggctactgtggagttccagtggatgggcagttgaccctttaggaacgattaatatcaatttgcacggtaacgttgttgatttctcctgtaccgtaaacacagcggatattgataagacggtagatttaggcagatggcctacgatacaactactgaacgctggcgataccacggcactcgtcccttttagcctgcggctggagggatgtcctccgggtagtgttgcgattttatttacgggaacgccggcatccgataccaacctgctggctctggatgatcccgcaatggcacaaaccgtcgccatcgaattacgtaatagcgatcgctcccggctcgcactgggggaggcgagcccgactgaggaagtagatgcaaatggcaatgtcacactaaacttttttgccaattatcgagcgttagccagcggtgttcggccaggtgtggcgaaagcggatgcgatatttatgatcaattataattaatattatattaattcgtataatttggcgtagtcgataagctctacaatactatgcaaacctagcttgccataaatattagatttatgcgcactaactgttttattgctaagtaataacttatcggcaatttctttattagataatccgctaaccagataacgtaatatggtcacttcacgattagatagcacagtgaccgtactactattcgtactacatttattgctttttatatagttaagcgtttcgctgggaaaaaacgtgtatccggagaggatcatctgaacggcatgaaaaatatcattctgatcattgcatttactgacaaaaccgttagcaccagcttgtatcgctctgccagcataaaagcattcacttttgctacttaaaaataacactttcactgtgctctggatttgtttgatccttttcaggaaggtaaaaccgtctgttccgggcaagtctatatccataatgattaaatcaacaggacgggttcggagataatcgatggttatgcgataatcatccgttttcaggacaatctgcaattcactgtttttttgcaacagaacttcaatagacattctgatgataggatgagtatccataatgatcacgctcgttggtttcatagttaccagtctcataggagcggacaattttccgttaggtcgggaaattgtactttgatacatgaaaatacgggttttcttgattcagacgcgcagcggtgtgcgtttgtttgccgctatagcgaaataaatcagaaaatcagacgcggtcgttcacttgttcagcaaccagatcaaaagccattgactcagcaagggttgaccgtataattcacgcgattacaccgcattgcggtatcaacgcgcccttagctcagttggatagagcaacgaccttctaagtcgtgggccgcaggttcgaatcctgcagggcgcgccattacaattcaatcagttacgccttctttatatcctccataatttcagagtgggacatatttgggacattatcaccaaaaatgtcgtctattttcctcgcatgctctgtcaaatgattaggcgcaaggtgagcatacctacgaaccatttctatggactcccatccgcccatttcctgaagcactgataatgggacgcctgactgaatcagccagcttgcccaggtgtgtctgaggtcatggaaacggaaatcttcctcatttatgcccgtcttatccgtttccgctttgcccttcaccacatcactttttgtcgctgtttggcgagataattcaacggtgtcaggccgtaaaacgccttaaaaacagagataaagtagctcgtgctgctatagccacataattgcgccacctgagtgatatttttgttatccatcaataacatctgtacggcgtaacgcatacgacactctgtgacaatctggctatagctggtattttcgttttttaatttctttttgagcaggctggggcttaaacataggctactggcgacaattcgcagattccagtaatgctgaatatcgctttgaataatgcggcagacgctgtcgcggacgctgctgcgtaagatatacatcagtagggcaataaaccggctttgctcaagaaagttagacaatacggtaaaaagcaatgcgcgcgtcaactccgcttcgcagggtctgctgggttgctgcttgctgtggttggcggctagccggaacacttccggtgtacggctatgacaagcgataaccggggttgccagccggctccagggctttacacaggttaagttcttatttaaaaacaacagataatcgttgatgatgttacggttgatgtgggtgattaatacgtgatttaacgtactgagttcaatgacgttattgttgcacgcgaaggcggccaggtagtttttcggaagggtaaacgtagcatggttattgacgcttacctctacctctttttcggtcaggatcaccacgcaaggttcactgctgctcaattgcatttcgcactcctcagatatcagaaactccgctcaaaggatctatgcttcctgcatgagtgatcggcccgttcgccgataacgatcttctttctttagcacgctttttagcaattaatcttgatggaattctgatgagagcgaaagaggtaagccaggtcgtacccgacttacctggaggagatttaatactcgagaatgccgtgcgcgacgggcaaatagcgcagagagaaatagagagtgtctttaccgcaagaggaacgtttcgctaacaggctggcaatttctgcgtccggtttcggtttcgctgtaaaggttttgcctttgccggcgacaaaaagttcataaacaacgccgctggcaggggcgggactttggcaatcggcgctggcctgtaaataacgttcacgctgttcagcggtcagtttatccacgccgctgccatcctgtacccagacattaacgccggttgctttaacgtgttccagcagttggcgatagccatcggggctcatgtttccggcgaaaaaactactgatataaaccggttttgcactaacatcgctaatcagccgctgcgcgttgtttaaccatgttagcaaaggctgacgggcggcttcgctgcgccagttcaggtcgtcaatttccgcgctgatgtaccagccatccggcgttatgccaggcgcggcgctccataatctggcttgctggagatcggcagccagcaggcgattaagatagctttccagcgctgcggagctctgtttctggtgcataaaaaattccggatcggcgttcagcccgacaataagcttcagaccagcctgttgcgcagctgcggcccgcttaaacaataacgtgcgctgttctggctgggtaaatgcatcgccgtaacgggtccattgcaaaacaagggtatcgaagccttgcaaacgtaactgactcatcagcccctgccactgggtatcggtaacctgactatctcggttttgtggttgccagataatacctttcatcgcaaaggaaaaagggctgaccaaaagcagtgtcagcaatacgaaaatgaacttacgcatttaccagtgcactccaatggtgagaaacgcgttgttgcgctctccgttacgttgattaatcgccttaaaggtatgttgatactcgacgccgagactgactttgtgcggccaggcgtcgtagtgcgtctcgccggtccagatattccagcggaccccgactccgccaagctgcgcgccctgagtgcctttatcacgatagccgttgtcctgaacgtgagcgtaaggctcaatagtctgtccgttagctaccttctgatgccagctgacgcgataatctgccgtccacgcctgaatatcctggcggatatattgcgccgcatcgaggtacaggttttgggcaaaccagccactaccgttcgggtgccattcgtcgctgtatttgccgccattaaagaaactggcgctggcgcgcagcatggtatcggatgcgccattttggccgttcagcggcaactgctgttcgacggcgatgaaaaagatctgatcgcgcagcggcttccagcgcagaccggtgccggacatcggatttttcaccggcatcatcaccccgttttctccggtatcggcaaagacgcggctataaacactgagcaggtcgccttccagcagcatattgcgtccgatgcggtactcggcttccagttgtccgtagctacgatagcttttccctggcgctgcgccgccgacattattgttagcggtactcattgcgccggaacgcaagccgatggaagaatcgaaactgaacgtccagcggcgaccgacctcctcatgcaaacggcggaaattgaagcgttgttgattttgttctggggtcagtggggttatcagcgcctgattatcaatgtcatcaatcaccagccgggcgtagtgctgcgtcgcaggcatgtcatccagacgctggttcacgtaggccagttgtcggatcagtgccggatcgtccggaagccctttatgcgccggttcgagcatttcccggctctgtgcgatatcaccgctatcccacaaggcgtaaccaagcgctgcctgggtgttgctattattcggttccagttccagcgcggcgcgcaaatcactcaccgcggccgggacattatgacgttggcgataaattgtcgcccgcgcaacgtaagcgttggcagaaggcgcaatattgatactgcgcgtgagatcgttcagtgcgagttccggctgaccaggaatgtaacgttgcgcatgcagccaccagtagagggcattgcttcccagtccacgtttttctgcctgttgtagccagcgatcgcgagccgcaccatttcctgccgcctgggcggtattggcagcagcaagcagatcctcattgctcatgtcgtgaagactgattttctgccaggccgccagtgcggtggcgtagtcctcaacctgatacgcctgataggctaccgcacgatgttgccaggcgctcggttgtcgttgttcggcctgaagccatgcatacaacgccacaccgggtagcgtgtcccgataacactttgccagacggttccaggcggcggcatcgtaggaagggctcatatcgcccagcaagcgaactattgccgggcaattatctgcaatacccggcaactgactttgccactgacgttgctccgccagcggtaagggtttgcttaaaatcgccaccttcgccggcgttgccaggtaaggatgactttccagcagagacgccagtcgcgccattaaagtctggctgacacgcgcatcgccctggaaaggatagcgttgcagcaataaatcggcagcttcgcgactctgctcgttctgcatcagttgccaggttagttgatccaggcgggtaagatttgccggttcttgctgatacagcaatcgtgccagacgcagagcttcagccttgttacgggtcgccacgctgacagcataacgctcctcaagcatttcattggcggggagggtggcgagcagtttttgcgctgcgtcgtactgaccttcttttaacagcaccggtagcgtcgcgccaacaacatactggcggttgtcggcaaactgtaccgtataattcgccaacgcctgaacggggttagcgctgtatttagataacagatagagccaacttttctcttgtgcgtccgtggtaaatagtggcttattttcaatgagataatgctggaggcgtgctttttcgccacgataagccagcgcggtcgcgtaagtaatataactctgaggatcggtgaagatcccctgactttgcagtgccaggatccgatcgtccagctgcccggcaagaagcacgtcaaaccactgacggcgttctgccgcgcttaatgtgttctgctggcgtgcttcattgtatagcgtatctgcctgggaccattgtttcaggtagattgcccgttgcagcagatcggttcgcagcgtttttccttccgggcttgcagcaaacgtcgcatcgttcagttgcgctctggcgacaggtaactgtgccagccgcagggcattctgcccgacttcactgcgacaacgcagggtcggcgcagcatcgcacgctttttgctgggcaagcagttcttcaactgtcgtaacgcttttcacttcaaccggaatagccgccagactgcgctcaagtcgggcatctcctgggtgacgtttcagttgatcctcaagcaacagccgcgcccggtcatcatgaccaaaatggcgataggcttccgcaaggtataaagtcagcggaatattatccggcacctgctggtgtatatattcaaattcgcggatggcggttgcttcgtcgttatttttctgtgccttcagcgctttatcgagacggggataaataacaaaatggcgataatcgctcagccccagctcttctgcgctggtgccgatattgtctgcgagtgcgctggtactcaataaagacgtcagcagtaaaccagaccatccgatgacgcgattaaggttattctccttcattttcggactccagttgcgcaacctgttctgtgtttaaacctgctttgagtaatagactttgcatgctaacttgtaattcgcgttgaattgtcaggacgcgatccaacgtttcctggctgataacgccttcggtgaccaaaaacttgccgagcggcagagaactgcgttcatggcgcaataacaacacgttaattgcactacgattaatatgaccgagcgtggtcagtatttcggcgaacaggaactgatgcggcacatattgccgccagatttcaccggcctgctgttccgtgagccactgatgctgaaccgcattgtacaacattgcccgcggatcgtgaccgcgtcggcgtgcataccagtgacgtaaccctgtgacaatttgtccccgcagaacaatgacgtaacgcactttgcgtccgactttacgcgtcagggccgccaggctaaccgggtcaataccatcttcactgccgacaattaactcgtcattttccagacgcagcggcagtaccgcataatgcagcgccacggaggccggcatttcggcaatcaggctggaagggatctgccaggcatcgatggattcccacgccacgccgttttgctctgccagcgcctgtgccagctgctcggcgctaatcagcccctgcatcagcatactaccgcccaggcgtagaccttcgacgcgattacgcagtgctgtatcgagttgttcttcagtgatgacctgattttccagcagaatttgacctaacgggcgcaagctgcgggtatcgccagtcacgctggggaagtcatgcgttgttttatcccacgccacgcgacgtggatcgccgtgttgaagtacctgttttagcgcgcgccagttggccatgaagttaatcaggttgccccagaaaagacgcaggacggaaagcagcccctgcgtcaggccgtagtagccagtaacgaaaatcacccgctgcacgatgcggttaaccatcaaaccaaagtttagccacagcagggtcattaaccatgcgctgccgctgaaaatagaaaggaaatgccaggcatcgggccacaaactttcatacgccagcaacagcaaaagctggatcatcaccagcatcgcgaggaagctgacaaagttactgattgcccctttgcggtcgcgccagagaaagtagttcagcgtcaggctggaggtccatttatgggttttaaagccttggaaaacaatgccgatgatccagcgggatttttgtcgaaccgcagtgctaaaggtatcggggaaatattcgcgcacgcagatcatgttacttgtccgcgcgtgctgtaaaaatttacgctgctcgcgttctttggcttcgtccaccaccggaaaacggacaaaaatttccgtcatacctttttctttcaggcggaagccaatgtcgtaatcttcagtaagactctgcacgtcgaaagcaataccgtcaccgtcagctaacagtgcggtcacggcgcggcggctgaaacaggtgccgacgcctgcgctgggcacttgtccggcgagggcttcacgcaccggaacatctttgccatgcagctcactaaactcatcaatgtaagtcatgctggtgaagtgcgtccattcgcgttcgaacggatacaccgggatctgaatcagatctttacgctcgaccagatagttgaacagacgcaattccatcggactaatcacatcttcggcgtcatgcagaataaaaccagcaaaagcgaaattggcgctacgctcaaattgggtgatggcgtccagcacgttgttcagacagtcggctttgctggtggggccaggacgcgcgcagactaccttatgcacattcgggaagcgagcgcacacttcgtcaacatcacgctgagtatcggggtcgttggggtaggtgccaacaaagatatgatagttttcgtagtcgagcgtggtcgccgccagctcggccatattgccgatgacgcccgtttcattccacgccggaaccataatcgctaacggtttttcatctggtttatacagttcgcggtaactcattcgcgggtagcggcgataaacactcaacttgcgtttaatgcggcgtacccagtagacgacatcaataaaaaaatcgtccagcccgctgatgaacatgatgaccgctaacgttatcgcgattacttttaagccgtagagccaggtagcaaaaacatcaagaagccagtccacacaaaaaccttacattaacgctggttatgtttagggtggcgtatattaaggttttttatgaattgtgacagctttttaccattaataggtatgactattgcggcacgttatttttacactggttataaaagttgccgtttgctgaaggattaagcgggtaatgtgataacaaaccttgtcccccgcgcatcgctcgttaccgcaaccgtgcctttatgcgcgacaacaatgcttttcactatcgccaggccaataccgctaccttcaccttttcgctggcgggaggggtcaacgcgatagaaacggtcaaacaatcgcggtaagtgctcgggcgcaatgggcgtaccggggttttcgacgataacttgcaccaggtgatcgaccgtctgacagcgcactacaattgtctctccggttggcgtataacgcagggcgttgctaagcaggttgcttagcgcccgacgcagcatcagcggatcgcccgcgacctgacacttgtcgccaacaaaccgcaactccacgccgcgatcttccgctaacgcctcgaaaaaatcgaacactttgccgacttcatccgccaggttgagcattttcttttcggggattagctggttgttatcggcctgagcgagaaacagcatatcgctgaccattttcgccattcgcgtcagctcttcgagattagagtagagcacatcttccagctccttctggctgcggctctggctgagggcgatttcggtttgcgttatgagattcgtaattggtgtgcgaatttcgtgagcgatatccgcactgaaattggactggcgggtaaagacatcctcaatacgctcgatcatatggttgaagctcagtaccagctgttccagctcaatgggcacggtctgcgggtcgaggcgaacgtcgagatctttgctggtaatattctggatttgacggctgacgctgcggatcggcgcgtgacctttatgtaccgccaacagtacgataaagacgatcaggatgctgattacgcttgcggtcataataagtttattcatcaaatcatttatgtaatgaagatgaaaatcgatgctaagcgcgatgtagagcgtataaatcggtttgccgtccaccaacgggccaaccggcaagttaatcatccgccagttgctgtgttccatatgcccgtgaccgtggcctggcatcatcatcgtcgggccggaaaggagatacacctcgccaccctgagcgtctttatcgggtatggcgtcacgcgtaaactcgcggatatccggcgcaccgggggagtgatacaccgttttaccctgactatctgccagggaaatcaacacattggaataaccactgacgatatcttccagcgtcattaagcgtcgggcttgcgtttcgtcagggtgatttagtacccgttcaagggtggcgctaatctcttttaaatcattaatatcctgctcggcaaaatgaacttttacactgtggatcatgatccatgcaaaggcgaaaaacgccgcgatggtggccaggctgataaaaaaggtcaggcgggttgccaggctaaacgggcgctgaaatggcttactgaccatccggcacctcaagcatgtaacccacgccgcgcacggtctgaattagcttcggctcaaagtcgttgtcgattttgccgcgcagccgcttcaccgccacatcaatagcattggtatcgctgtcaaaattcatgtcccatacctggctggcgataaggctgcggggcagcacttcgccctgatggcgaaggaagaactccagcagagtaaactctttactggtcaaagtgatgcgcgtgccgctgcgggtgactttgcggctgacgagatcgaccatcaaatcggcaacctgaaactgactttcgataatcaccgccgccccgcgccgcagtaatgtgcgcacccgcgccagcagttcagcaaaagcgaatggcttcaccaggtagtcatctgcccccaactccagccccttgacgcgatgttcaatggtgccaagcgcggtaagcaacagaatcggcatccctttattggcggagcgtaacatgcgcacgatatcccagccgttcacgtccggcagcataatatcgaggattatcagatcataatcaccggtcatcgccagatggtagccattcagcccgttgtcggccaaatcgaccacaaaaccggcttcggttaaccctttggtcaagtattctccggttttcttttcatcttcgacaatcaacagtttcatatttcctccgcatgttgcccgggcaattctagagtagcgggatcagatggcaatcgcttattggcaaaatgacaattttgtcatttttctgtcaccggaaaatcagagcctggcgagtaaagttggcggcataaaatcaccagaaattatgagcctatgtctccttgtaaacttctgccattttgtgtggcccttgcgctaaccggttgtagtctggcaccggattatcagcgtccggcaatgcccgtgccgcagcagttcagtctcagccagaacggcctggttaacgcagcagataactatcagaacgcgggctggcgcaccttttttgttgataatcaggtgaagacgctgattagcgaggcgctggtgaataatcgggatttgcgcatggcgacgctgaaagtgcaggaggcacgggcgcaatatcgtctgaccgatgccgaccgctacccacagctcaatggcgagggcagcggcagctggagcggtaatcttaaagggaataccgccacgacacgggagtttagcaccggccttaacgccagctttgacctcgattttttcggtcgcttaaagaacatgagcgaagccgagcgacaaaattatttagccactgaggaagctcagcgcgcggtgcatattctgctggtttctaatgtcgcgcaaagctatttcaatcagcaactggcgtatgcgcaattgcaaatagccgaagaaacgctgcgtaattatcagcagagttatgcgtttgtcgaaaaacaactgttgacaggtagcagtaatgttctggcgctggaacaggctcgcggggtgatagaaagtacccgcagcgacatcgctaaacgtcagggggaactggcgcaggcgaataatgcattgcaactgttgctgggaagctacggcaagctgccgcaagcgcagacagtaaacagcgacagcctgcaaagcgttaaattaccggcgggattgagcagccaaatcttattgcagcgcccggatattatggaagctgaacacgcgttaatggcggctaatgccaatattggcgctgcacgcgcggcattttttccgtctataagcctgaccagcggaataagcaccgccagtagcgatctaagcagtttatttaacgccagcagcgggatgtggaattttatacccaaaattgagatccccatttttaatgccggacgcaaccaggccaatctggatatcgccgaaattcgccagcagcagagcgtggtgaattatgaacagaaaatccagaacgcctttaaagaagtggcagatgcgctggcattacgtcaaagcctgaacgatcaaattagcgcccagcagcgttatctggcaagcctgcaaattactttgcaacgggcgcgggcattatatcagcacggcgcagtaagttatctggaagtgctggatgccgagcgttctttatttgcaacccgacaaactttacttgatctgaattatgcccgtcaggttaacgaaatttctttgtataccgcacttggtggcggttgacagcaatatactcgtcatacttcaagttgcatgtgctgcgtctgcgttcgctcaccccagtcacttacttatgtaagctcctggggattcactcgcttgtcgccttcctgcaactcgaattatttagagtatgacttttaactccaggagagaataaatgaaaaaagcactgcaagtcgcaatgttcagtctgtttaccgttattggctttaatgcccaggctaacgaacatcatcatgaaaccatgagcgaagcacaaccacaggttattagcgccactggcgtggtaaagggtatcgatctggaaagcaaaaaaatcaccatccatcacgatccgattgctgccgtgaactggccggagatgaccatgcgctttaccatcaccccgcagacgaaaatgagtgaaattaaaaccggcgacaaagtggcgtttaattttgtccagcagggcaacctttctttattacaggatattaaagtcagccagtaacccaggtttaatgagatgaaaaaaatcgcgcttattatcggcagcatgatcgcgggcggtattatttctgcggcaggttttacctgggttgcaaaggcggaaccgcctgcagaaaaaacgagcaccgcagaacgtaaaatcttattctggtacgacccaatgtatcccaatacgcggttcgataaaccaggtaaaagcccgtttatggatatggatctggtgccgaaatatgccgatgaagagagttctgcgtctggtgtgcgcattgacccgactcagacgcagaatctgggggtgaaaacggctaccgtcacgcgcggaccgctgacttttgcccagagtttcccggcgaatgtcagttacaacgagtatcagtatgccattgtgcaggctcgcgctgccgggtttatcgacaaggtgtatccgcttaccgtgggcgataaagtacaaaagggcacaccgcttctcgacctgaccattcctgactgggtggaagcgcagagtgagtatttactgctgcgcgaaaccggcggtacggcgacccagactgaaggcattcttgagcggctgcgactggcgggaatgccggaggcggatattcgccgcctgatcgccacgcaaaaaatccagactcgctttacgctcaaagcgcccattgatggcgtgatcaccgcgtttgatctgcgcgcgggaatgaatatcgccaaagataacgtggtagcgaaaattcagggtatggacccggtgtgggtcactgctgcgatcccggagtctatcgcctggctggtgaaagatgccagccagtttaccctcaccgttccggcgcgaccggataaaacactcaccatccgcaaatggacgctgctacctggcgtggatgccgcgacccgcacgctgcagctgcgtctggaagtcgacaacgccgacgaggcgctaaaaccgggcatgaacgcctggttgcaactcaacaccgccagcgaaccgatgctgctcattccgagtcaagcgctgattgataccggcagcgaacagcgggtgattaccgttgatgccgacgggcgctttgtaccgaaacgcgttgctgttttccaggcaagccaaggcgtcaccgcattacgctctggtctggcggaaggtgaaaaggtggtttccagcggcctgttcctgattgattccgaagccaatatttctggcgcactggagcggatgcgctctgaaagtgcgacccatgcgcattgagggaataaccaatgattgaatggattattcgtcgcagcgtggcgaaccgttttttggtgctgatgggcgcgttgtttctgagcatctggggcacctggaccatcattaatacgccagtggatgcgctgccggatctctccgatgtgcaggttattattaaaaccagctatcccggtcaggcaccacaaatcgttgaaaatcaggtgacttatccgctaaccaccaccatgttgagcgtgcctggcgcgaagactgtgcgcggtttcagtcagtttggcgactcttatgtgtatgtcattttcgaagatggcaccgatccgtactgggcgcgtagccgggtgctggagtacctcaaccaggtacagggtaagctgcctgcgggagtcagcgccgagctggggccagatgccacgggtgttggctggatctatgaatatgcactggtggatcgcagcggtaagcacgatctggccgatttacgcagtttacaggactggtttctcaaatatgagctgaaaaccatccctgacgttgcggaagtggcgagcgtgggcggtgtggtgaaagagtatcaggtggttatcgatccccagcgcctggcgcagtatggcatcagtctcgccgaagtaaaaagcgcgctggatgctagtaaccaggaagcgggcggtagcagcatcgaactggcggaagcggaatatatggtgcgcgccagcggctatctgcaaacgctcgacgactttaatcacatcgttttaaaagccagtgaaaatggcgtgcccgtttatctgcgcgatgttgcgaaggtccagattggcccggagatgcgccggggcattgccgaactaaacggcgaaggcgaagtggcgggcggggtggtgatcctgcgatccggcaaaaacgcccgagaagtgatcgccgccgtgaaggacaaactggaaacgctgaaaagtagtctgccggaaggcgtggagatagttacaacatacgatcgcagccagctcattgaccgcgccatcgacaacctcagcggcaagttgctggaagagtttattgtggtggcggtagtctgtgcgctgtttctctggcatgtgcgcagcgcgctggtggcgattattagcttgccgctggggttgtgtattgcttttattgtcatgcacttccagggactgaatgccaatattatgagcttgggtggcattgcgattgccgtcggggcgatggtcgatgctgctatcgtcatgatcgagaatgcgcataaacggctggaagagtggcagcaccagcatcctgacgccacgctggataataaaacgcgctggcaggtgatcaccgatgcgtctgttgaagtggggccggcgctatttatcagtctgctgattatcacgttgagctttatcccgatcttcaccctggaagggcaggaagggcgtctgtttggcccgttggcgttcaccaaaacgtatgcgatggcgggtgcggcgctgctggcgatcgtagtgatcccgatcctgatgggctactggatccgtggcaaaattccgccggaaagcagtaacccgctcaatcgctttttgattcgtgtttatcatccgctgttgctgaaagtactgcactggccgaaaaccacgctgctggtggcggcgcttagcgtgctgacggttctctggccgctcaataaagttggcggggaatttttaccgcagatcaatgaaggcgacttgttgtatatgccaagcacgctgccggggatttccgcagcagaggcggcgagtatgctgcaaaaaaccgacaagctaattatgagcgtacctgaagtggcgcgggtatttggcaaaaccgggaaagcggaaaccgccaccgattctgctccgctggagatggtagaaacgaccatccagcttaagccgcaggagcagtggcggccaggcatgacgatggacaaaatcattgaggaactggataacaccgtgcggctgccggggctggcgaatctgtgggtgccgccaattcgtaaccgtatcgatatgctcagtaccggcattaaaagccccatcggcattaaagtttccggcactgtgctggcggatatcgacgcgatggctgagcaaattgaagaagtagcgcgaacggtgccaggcgtagcttctgcgcttgccgagcggctggaaggtgggcgctatatcaacgttgagattaaccgtgaaaaagccgcacgttacggtatgacggtggcggatgtgcagttgtttgtgacttctgcggtgggcggggcgatggttggcgaaacggtggaagggattgcccgttatccaattaatctgcgttatccgcaaagctggcgcgatagtccgcaggcactgcgccagctgccgatcctgacgccgatgaagcagcaaatcaccctggcagacgtggccgacattaaagtctctaccggaccgagcatgctgaaaaccgagaatgcgcgcccgacgagctggatttatatcgatgcccgcgatcgtgacatggtgagcgtggttcacgatttgcaaaaagcgatagctgaaaaagtgcagttaaaaccgggcaccagcgtggcattctccgggcagttcgagctactggagcgcgccaaccataagcttaaactcatggtgccgatgacgttgatgattatcttcgtgctgttgtatctggcgttccgtcgggtgggcgaagcgttgctgattatcagcagcgtaccgtttgcgctggtgggcggcatctggttgctgtggtggatgggctttcatctttccgtggcgacgggcactggctttatcgccctcgccggggtcgccgccgaatttggcgtggtgatgctgatgtatttacgtcacgccatagaggccgtgccgagcttgaataatccacaaacattcagcgagcagaagctggatgaggcgttatatcacggcgcggtcctgcgcgtgcgcccgaaagcgatgacggtggcggtgattatcgccggtctgctgccgattctgtggggaacgggggctggtagtgaggtgatgagccggattgccgcgccgatgattggcggcatgatcaccgcacctttgctgagcctgtttattatcccggcggcgtataagctgatgtggctgcaccgacatcgggtacggaaataaaagcaggataccccgtttaaccgtgtggattgtgtcttgcgacgatgggcactaaatgttaaaaggtgcccctcaacaaaaaagacacacaggggaaaggcgtgaaaaacgcgagtaccgtaagcgaagatactgcgagcaatcaagagccgacgcttcatcgcggattacataaccgtcatattcaactgattgcgttgggtggcgcaattggtactggtctgtttcttggcattggcccggcgattcagatggcgggtccggctgtattgctgggctacggcgtcgccgggatcatcgctttcctgattatgcgccagcttggcgaaatggtggttgaggagccggtatccggtagttttgcccactttgcctataaatactggggaccgtttgcgggcttcctctctggctggaactactgggtaatgttcgtgctggtgggaatggcagagctgaccgctgcgggcatctatatgcagtactggttcccggatgttccaacgtggatttgggctgccgccttctttattatcatcaacgccgttaacctggtgaacgtgcgcttatatggcgaaaccgagttctggtttgcgttgattaaagtgctggcaatcatcggtatgatcggctttggcctgtggctgctgttttctggtcacggcggcgagaaagccagtatcgacaacctctggcgctacggtggtttcttcgccaccggctggaatgggctgattttgagcctggcggtaattatgttctccttcggcggtctggagctgattgggattactgccgctgaagcgcgcgatccggaaaaaagcattccaaaagcggtaaatcaggtggtgtatcgcatcctgctgttttacatcggtagtctggtggttttactggcgctctatccgtgggtggaagtgaaatccaacagtagcccgtttgtgatgattttccataatctcgacagcaacgtggtagcttctgcgctgaacttcgtcattctggtagcaagcctgagtgtgtataacagcggggtttactctaacagccgcatgctgtttggcctttctgtgcagggtaatgcgccgaagtttttgactcgcgtcagccgtcgcggtgtgccgattaacagcctgatgctttccggagcgatcactagcctggtggtgttaatcaactatctgctgccgcaaaaagcgtttggtctgctgatggcgctggtggtagcaacgctgctgttgaactggattatgatctgtctggcgcatctgcgttttcgtgcagcgatgcgacgtcaggggcgtgaaacacagtttaaggcgctgctctatccgttcggcaactatctctgcattgccttcctcggcatgattttgctgctgatgtgcacgatggatgatatgcgcttgagtgcgatcctgctgccggtgtggattgtattcctgtttatggcatttaaaacgctgcgtcggaaataaggcattcacgctacatccgacaaaacgatgtcaaccatccgaaaccgctctcatccattcgatgagagcggtttttttaattactgcttaaatgcacccgccagagagcgaatatcattgccggttggcgagtaatccccgcatatccggttgtcaggtcaggatggtaaggcacctgctttacactttcgcccgtggtcagtgatggctgcgggcgaatcgtaccagatgttgtcaattaatcgtgttggcacagcgttatgactatcttttcttttatctgccagtgcacagcaaacatctcattctcacgatgaatgatgacctgctgtttattccagctaattatctgatagtccagaaaacctgcatcagtttggatctcacttgccttaaatgcgctctctttggcggaaaatgccagtgtcagcgccagagaaaaggctaaaccgcagtctgcgagtcgctcgtgttccgctggtgtaataatgttgtctgtcaattctcttgcggtttgtacagaaaaaatttcttctatatcaatgccaatcggttgacgagataccacggctaatgccgtagtcccacagtggctaatactgccgtatacctccgcaggccagacaggttggcgtagctcgccgattgcgggcacacatttatagccatattcccgcaaagcataaacagcagcgatccgtccggctaaatgctctgttttacgtttacgtccagcgtgttgcagttgtgcgtagtgcggcagccagagtaaatcctgctcacaaaaattcgccggatcgaactcaacaaaatgcagcgtatgtccggcaaaggggagggaggtatgcgtagttttcatatcgaccatattcgagactgatgacaaacgcaaaactgcctgatgcgctacgcttatcaggcctacatggtcctgcaatatattgaattggcaagatttttgtaggccggataaggcgttcacgccgcatccggcatgaacgacgcgcactttgtcaacaatctgacgttagcatcagaagtgggtgtttacgctcatataccacgtacgtcccggctcgttataggtatacgccccggcaccggcgatatagttggcccctgccgaatcgcccgtggtctgggcattacccgcacgccacaaacgtttgtcgaacagattgtccacgccgccggtcagactgacattcttcgtcacatcccaggtcgcgctcaggccaacaatgctgtaaggactaatttctttggtttccggtccaaccgctggctgacctttatagttgtacttcttcggctgctgcttgccgtaccaggtgaaggtcgtttgcatgctcaaatcttcccgtgcctgccagctcagcgtactgttcaacgtatactccgggatgatgctcaaacggtcgcccgtggttttgttttcactcttcagcatataagtgatgttattggtccacatcaccgtttcgctaaccggtacgtttaagcttccttccagaccttcaaccaccgctttcggcacgttatcccactgatagagatcggtgccgactgcgttttgccctacagccacatagcccgcttcaatcttattgcgataatcgttacggaaccaggtgacgcccgccagccacccgtcgcgtttgaactccagaccaatctctttgttgatgctggtttctgctttcaggtcatcgttaccttgcagatagcagccgcccgcgctggcatagcaaccctgacctttactgtagagaatgtagttcgggttagtctggtacaggctcggcgctttataagcacgggcgatgcccattttcagcgtgaagtcatcgcctaaaccttggcttatgttcagcgccgggctccagttattgccgacaatactgtgatgatcgaaacgcagccccggcgttacgatggtgctgtcagtcagctccatgttgttttcggcaaacaggctgaaaatttctgctttactatacgggctacggtcggtggtactcacgccatcaatagcgccaccggtattcgttccggtcagtgcctgggtgttggaacttaagtccttcatccgttgctgattccactccgtacccagcgtcagcgtctggttaacgaggaaatcaatcggcaggttaacttcgctgtgcagcatcacgtcatcaagatcgatatcgacgaaatcctgtgtcgctttttcgttaaatttcccttcggtaccgcccgccagaccttccggaatacggctgttacgggtgtgttcgtactgcacccagttgctggtggtcacgccgttatcccagccaccgttccaggtcagcgcgtagttctggcgatacagacggttggtttcatcgccatatttgctgcgggtataggaatcggagttggtattctgggtgtcgcccgcatacaggttaccctggcggctgtaacctgcttccagttccaggctttgcaatggcgcgaaatcccagcgcaccacgccattaatatctttgttgattaccccttcgcgcccggctggtaacgtcgtggcatacgttccggcacgcgcggactgatggccctggttgatatcccacgcgtcagcctgggttttgtcgaggttgccatacaaacggaagctgaattcgtcgcccagcggaccggtcaggctaaagttagtgcgtttggtggcaccttcctctttatgttctggcgcattgaaatatgcgtcccaggagccgtgccactcgccgctgccttttttggtaatgatgttaaccacgccgcccgccgcgccgttgccataacgcgcagctgccggaccacgcagaacttcaatacgttcaatcatttcaggtggcacccaggaagtatcaccacgggtatcgcgctcgccacgccagccctgacgcacgctgttacggctgcttaccggcttgccgtcaatcaaaatcagcgtgttttccggacccataccgcgaatatcaatctgtcggttattcccacgctgaccactggtggagttaccggtcaggttaacgcctggcatggtacggatgatcttgctcacatcgcgggcaaccgggtttttgcggatttcatctgcggtgatggtgctaacgccaggcgcctgtaagttctgctcggcggcggtaacgacaatagtatcgtcatgactaacaggagtatcggtcggctcttgtgcctgcgctaccccataaatccccagattgaccaacaaggccagggaatgaatcttcttgttcattgttttattcctgcatttttgccacgaattgcaactgtcgggcatggtcgtcatcaacacgacgcatcccgctaccgcgaaaacctttgatcctgaaagacacgcagtgcagttggttaattaatgtccgcgcttcccacggcgcgccattacgctattgcaaatgcaaatagttatcaataatattatcaatatatttctgcaatcaatgaaaaattgcacagtaaacatggggttatggtgtgacggcgttaaaagtaggaagtgagagctggtggcagtcgaaacatggcccggaatggcagcgtctgaatgacgaaatgtttgaggtcactttctggtggcgtgatccccaaggttctgaagaatacagcacgataaagcgcgtatgggtctacatcactggtgtgaccgatcaccatcagaacagccagccccagagcatgcagcgaattgcaggcactaacgtctggcagtggacgacacaactcaatgccaactggcgcggcagctactgctttattcccaccgaacgcgatgacattttttctgtaccatcccccgatcgcctcgaattgcgcgaaggctggcgaaaactattaccccaggcgatagccgatccgctgaacctacaaagctggaaaggcgggcgagggcacgctgtttctgcactcgaaatgccgcaagcgcctctgcaaccgggatgggattgtccgcaagcgccagaaatacctgccaaagaaattatctggaaaagtgaacggttgaaaaagagtcggcgtgtatggatttttaccaccggcgatgcaacagcagaagaacgcccgctggcagttttgctcgatggcgaattttgggcgcaaagtatgcccgtctggccagtgctgactagcctgacccatcgtcagcaacttcctcccgccgtgtatgtgttgatcgacgctatcgacaccacgcaccgcgcccacgaactgccgtgtaatgcggatttctggctcgcagtacagcaagagttattacccctggtgaaagctattgccccttttagcgatcgtgccgatcgcaccgtggttgccgggcagagttttggtgggctttccgcgctgtatgccggactgcactggcctgaacgctttggctgtgtattaagccagagtggaagctactggtggccgcatcggggcgggcagcaagagggcgtgttacttgaaaagctaaaagctggtgaagttagcgccgaaggtctgcgcattgtgctggaagcgggtattcgcgagccgatgatcatgcgggccaatcaggcgctgtatgcgcaattacaccccataaaagaatccattttctggcgtcaggttgacggcggacatgatgcgctttgttggcgcggtggcttgatgcaggggctaatcgacctctggcaaccacttttccatgacaggagttgaatatggcattcagtaatcccttcgatgatccgcagggagcgttttacatattgcgcaatgcgcaggggcaattcagtctgtggccgcaacaatgcgtcttaccggcaggctgggacattgtgtgtcagccgcagagtcaggcgtcctgccagcagtggctggaagcccactggcgtactctgacaccgacgaattttacccagttgcaggaggcacaatgagccagcatttacctttggtcgccgcacagcccggcatctggatggcagaaaaactgagtgaattaccctccgcctggagcgtggcgcattacgttgagttaaccggagaggttgatagcccattactggcccgcgcggtggttgccggactagcgcaagcagatacgctgcggatgcgttttacggaagataacggcgaagtctggcagtgggtcgatgatgcgctgacgttcgaactgccagaaattatcgacctacgaaccaacattgatccgcacggtactgcgcaggcattaatgcaggcggatttgcaacaagatctgcgcgtcgatagcggtaaaccactggtctttcatcagctgatacaggtggcggataaccgctggtactggtatcagcgttatcaccatttgctggtcgatggctttagtttcccggccattacccgccagatcgccaatatttactgcacatggctgcgtggcgaaccaacgcctgctagcccatttacgcctttcgctgatgtagtggaagagtaccagcaataccgcgaaagcgaagcctggcagcgtgatgcggcattctgggcagaacagcgtcgtcaactgccgccgcccgcgagtctttctccggcacctttaccggggcgcagcgccagcgcagatattctgcgcctgaaactggaatttaccgacggggaattccgccagctggctacgcaacttagtggtgtgcagcgtaccgatttagcccttgcgctggcagccttgtggctggggcgattgtgcaatcgtatggactacgccgccggatttatctttatgcgtcgactgggcagcgcggcgctgacggctaccggacccgtgctcaacgttttgccgttgggtattcacattgcggcgcaagaaacgctgccggaactggcaacccgactggcagcacaactgaaaaaaatgcgtcgtcatcaacgttacgatgccgaacaaattgtccgtgacagcgggcgagcggcaggtgatgaaccgctgtttggtccggtactcaatatcaaggtatttgattaccaactggatattcctgatgttcaggcgcaaacccataccctggcaaccggtccggttaatgaccttgaactggccctgttcccggatgtacacggtgatttgagtattgagatcctcgccaataaacagcgttacgatgagccaacgttaatccagcatgctgaacgcctgaaaatgctgattgcccagttcgccgcggatccggcgctgttgtgcggcgatgtcgatattatgctgccaggtgagtatgcgcagctggcgcagctcaacgccactcaggttgagattccagaaaccacgcttagcgcgctggtggcagaacaagcggcaaaaacaccggatgctccggcgctggcagatgcgcgttacctgttcagctatcgggaaatgcgcgagcaggtggtggcgctggcgaatctgctgcgtgagcgcggcgttaaaccaggggacagcgtggcggtggcactaccgcgcagcgtctttttgaccctggcactccatgcgatagttgaagctggagcggcctggctaccgctggataccggctatccggacgatcgcctgaaaatgatgctggaagatgcgcgtccgagcctgttaattaccaccgacgatcaactgccgcgctttagcgatgttcccaatttaacaagcctttgctataacgccccgcttacaccgcagggcagtgcgccgctgcaacttagtcaaccgcatcacacggcttatatcatctttacctctggctccaccggcaggccgaaaggggtaatggtcgggcagacggctatcgtcaaccgcctgctttggatgcaaaatcattatccgcttacaggcgaagatgtcgttgcccaaaaaacgccgtgcagttttgatgtcagcgtgtgggagtttttctggccgtttatcgcaggggcaaaactggtgatggctgaaccggaagcgcaccgcgacccgctcgctatgcagcaattctttgccgaatatggcgtaacgaccacgcactttgtgccgagcatgctggcggcatttgttgccagcctgacgccgcaaaccgctcgccagagttgcgcgacgttgaaacaggttttctgtagtggtgaggccttaccggctgatttatgccgcgaatggcaacagttaactggcgcgccgttgcataatctatatggcccgacggaagcggcggtagatgtcagctggtatccggcttttggcgaggaactggcacaggtgcgcggcagcagtgtgccgattggttatccggtatggaatacgggtctgcgtattcttgatgcgatgatgcatccggtgccgccgggtgtggcgggtgatctctatctcactggcattcaactggcgcagggctatctcggacgccccgatctgaccgccagccgctttattgccgatccttttgccccaggtgaacggatgtaccgtaccggagacgttgcccgctggctggataacggcgcggtggagtacctcgggcgcagtgatgatcagctaaaaattcgcgggcagcgtatcgaactgggcgaaatcgatcgcgtgatgcaggcgctgccggatgtcgaacaagccgttacccacgcctgtgtgattaaccaggcggctgccaccggtggtgatgcgcgtcaattggtgggctatctggtgagccaaagcggcctgccgttggataccagcgcattgcaggcgcagcttcgtgaaacattgccaccacatatggtaccggtggttctgctgcaacttccacagttaccacttagcgccaacggcaagctggatcgcaaagccttaccgttgcctgaactgaaggcacaagcgccagggcgtgcgccgaaagcgggcagtgaaacgattatcgccgcggcattcagcagcttgctggggtgtgacgtgcaggatgccgatgctgatttcttcgcgcttggcggtcatagcctactggcaatgaaactggcagcgcagttaagtcggcaggttgcccgccaggtgacgccggggcaagtgatggtcgcgagtactgtcgccaaactggcaacgattattgatgctgaagaagacagcacccggcgtatgggattcgaaaccattctgccgttgcgtgaaggtaatggcccgacgctgttttgtttccatcctgcgtccggttttgcctggcagttcagcgtgctcagccgttatctcgatccacaatggagcattatcggcattcagagtccgcgccccaatggccccatgcagacggcggcaaacctggatgaagtctgcgaagcgcatctggcaacgttacttgaacaacaaccgcatggcccttattacctgctggggtattcccttggcggtacgctggcgcagggtattgcggcgcgactgcgtgcccgtggcgaacaggtggcatttcttggcttgctggatacctggccgccagaaacgcaaaactggcaggaaaaagaagctaatggtctggacccggaagtgctggcggagattaaccgcgaacgcgaggccttcctggcagcacagcagggaagtactagtacggagttgtttaccaccattgaaggcaactacgctgatgctgtgcgcctgctgacgactgctcatagcgtaccgtttgacggtaaagcgacgctgtttgttgctgaacgcacacttcaggaaggtatgagtcccgaacgcgcctggagcccgtggatagcggagctggatatctatcgtcaggattgtgcgcatgtggatattatctctccagggacgtttgaaaaaattgggccgattattcgcgcaacgctaaacaggtaaattaatattatttataaacccataattacagaaaataattatgggttttttatttgtttgatttataggtttgatgaatatttctcttaaatagagtgaatgttgcattcagtggaaggaatttacaaacttcagcttcggataattatcaccaactggtaaagtgagcgccgtggagatttccccctattggactcattttcaggttataccccatgagtagtctgaatattaaacagggaagtgacgctcattttcccgattatcctctggcgagccccagtaataatgaaattgatttacttaatctaatcagtgttttatggcgggccaaaaaaacggtcatggcggtcgtttttgcgtttgcctgcgcaggcttgctgatctctttcatcctgccgcaaaaatggaccagcgcggcggttgtcacgcctccagaacctgttcagtggcaagagttggagaaaagtttcactaagcttcgtgtgctggatctggatatcaaaattgatcgtacagaagcatttaacctgtttatcaagaagtttcagagcgttagcttgctggaagagtacctgcgtagtagtccttatgtgatggaccaattaaaagaggcgaaaatcgacgaactggatttgcatcgcgcaattgtcgcattgagcgaaaaaatgaaagcggttgatgacaatgccagtaagaaaaaagatgaaccgagtctgtatacctcctggacgctaagttttaccgcgccaaccagtgaagaggcgcagaccgttttgagcgggtatatcgattatatctctacgttggtggtgaaagagagcctagaaaacgtccgtaataaactggagatcaaaacccagtttgaaaaagaaaaactggctcaggatcgcattaaaacgaaaaatcaacttgatgcaaacattcagcgcctcaattatagtctcgacattgccaacgcggcaggaattaaaaagcccgtttacagtaatggtcaggccgttaaagatgaccccgatttttctatttctctcggtgcagacggtattgaacgcaaactggaaatagaaaaagcggtcactgacgttgcggaactgaacggtgaattacgtaatcggcagtatcttgtcgagcaattaacaaaagcacatgtcaacgatgtgaattttacgccgtttaaatatcagttaagcccgagtttgccagtgaaaaaagacggtccgggtaaggcgattattgtgatcctttccgcgttgatcggcgggatggtggcttgtggtggcgtgctgttgcgctatgcgatggcatccagaaaacaggatgccatgatggcagaccacttagtttaactatttgcggtactaggtgccgttcgtccgagcggcaccacaagcggcgttccggcaactggatcgtcaatgatcatgcagcgcagaccataaatgcgctcaatcagttcagcagtgacaatctccttcggcgctccctgagcaacaattttcccttcccgcaatgcaatcaaatggctggcgtaacgacaggcctgattaagatcgtgcagcaccgccgccagggtatagcctttttcgcggttcagttcgcttaacaactccagcaaatcaatctgatgactgatatccagccaggtcgtgggttcgtcgagcagcataattgccgtttcctgggccagcaccatcgcgatccacgctcgctggcgttgtccgccagaaagggtatccacgctttgatctgccagatgagttattcccgtggcctgcattgctttcgttaccgcttcttcatcctctttgcgccagcgggtaaacagcggttgatgcggataacgtccacgcgccaccagctcctgcacggtgatatcgcccggcgtggtagcattttgcgccaacagaccaatccggcgtgcaacctctttactggcgtaatgttgaatgtgctcgccatccagccagacatgcccatgagcaggcgtcatcaggcggcttaaggtacgcagtaacgtggatttaccgcagccatttggcccgataattgccgtgaagtgaccatcaggtatttctacagtcagattttccgcaacggtatatttgccatatcccagggttaactgttcgccgcgcaaacgggctacactttcggtcattttttgcgagactcctgaattaacaagacgataaggtaaataccgccgaggctgacggtaacgacgccaaccggaagttgatacggcataaacagttgttgggcgcagagatcggccgccagcagtaacagcgccccgcatagcgccgcctgggttagcccccagcgagcggtgccgctaatgcgtcgggcaatgtgcggtgcgactaaagcaataaaggaaatcggcccggcaagcgctgttgccgcagcggtaagcaccactgcaaccagcatcattaacagacggctacgttcgacgctgacgcccagcgcacacgcggtatcatcgcccatttccagcaagcgcatccggcgtaccagtaaggcggcggcaatgagcatcaatataatgatgggtgcggaagggctggtttttgcccacgtcaggccgttgaggcttccggcattccacaaacctgctgttagcgccgtttctaaagacgctttcagcaacagccaggtattaaaggccaccagcatggcgcgaacgccgataccgataataatcaaccgaaaggtgtcgatgccgttgcgccaggcgagcagccagaccagcaggctagtgacaatgccgcccaccattgcactcagcgcgatagccgtcaggtcctgaccaaacagcaccatcgccaccagcacgccgctccacgccccggtgttaaagcccattacgtcagggctgccgagcgggttacgcatcaggctctgaaaaatcgcgccactgacgcccagtgctgcgccaatcaacagcgccatcagcacgcgtggtaaacgccattcggtgaccaccatcgtcatactgcgcggcgcatcgcccatcagcgcggcgaatacctggctggtttccagcgtgacggcaccgctgcgtaatccccagatacctgcaaccacacaggcggaaaccagcagcaaacaggtgatgagtaatcggcgagagacgtaaatcatgcaccacctcgcgttttacgtcgcacgaggaagatcagcaccggtgcaccaataaacgcactgaccacagaaacgcgcagttcgccgggcacaatcacccgcccgatgatatcggcaaacagcagcagggcaggggtagcaagtagcgtgacgggcaggctccagcgatgatcggcacccaccagccaacgcgccatatgcggcatcatcaggccaataaaggcaatcgggccaactattgccgtcgcactaccacaaagcacggtaatcgccagcagaccaatcaactgtgtgcgcgccacgcgactgcccagcgccgtcgcggtgtcgctgccgaggctcaaactgttcagcgcgcgactcagtaatagcgcagttgctccggcgatcagcaccgggatcagcaccacttttaaggtatgtagattgcgaatatccaggctaccggcttgccagaaacgcaactgatcgtagacgtcaggattaagcagggcgatgccgctggtcagtccttccagcaccgccgccagcgccacgcccgccagggttaaacgcaccggacttaactgcccgccgccctgactgccggtaaaggcaacaatcaaactggccaccagcgccccggcgaaggccatcgccagttgttcctgcgcggaagagtaaccaaacagcgccgcacccagcacaatggcaaagctggctccggcgttcacgccaagcaagccggggtcggcaagtgggtttcgggtgagggtttgcattaacgccccggcaaggccaagcgcgccgcctgccagtaaaccggcaagggtacgcggcagccgcgcgtcgagcacgatggtgcagtcggcgctctggcaggtgccggagaaggcctccagcactacggaagcggggagactttttgccccaatgagcaggcttaatgccgtcgcgataatcagtaataacagcaatccgggcacggcaatggcgcgtgtcacggcaacagaaccagacatacgaacttccatgataatgaaattaattatcgttatcgatcttatttggatatgttagcatgtgcagcctaagaataggtatttaaaatatttgatggcaaggcattgtaatgaataaacaatcctggctgcttaacctcagcctgttgaaaacgcacccggcgtttcgcgcagtattcctcgctcgtttcatcagtattgtgtctctgggtttgctcggcgtcgcggtgccggtgcagatccagatgatgacacattccacctggcaggtggggcttagcgtgacgctgaccggcggcgcgatgtttgttggcctgatggtcggcggtgtgctggcggatcgctatgagcgcaaaaaagtgattttgctggcgcgcggcacctgtggcattggcttcattggactgtgccttaatgcactgctgccggagccgagtttgctggcaatctatttacttggtttatgggatggttttttcgcaagccttggcgttacggcgctattggcggcgacaccagcactggtagggcgtgaaaacttaatgcaggccggggcgatcaccatgttgaccgtgcgtctggggagcgtgattagccccatgattggcggtttattgctggcgaccggtggcgtagcctggaactacgggctggcggcggcgggcacgtttattaccttgctaccgttgttaagccttccggcgttgccaccgccaccgcagccgcgtgagcatccgttgaaaagtttactggcaggatttcgttttctgcttgccagcccgctggtgggcgggattgcgctgctgggtggtttattgacgatggcgagcgcggtgcgggtactgtatccggcgctggctgacaactggcagatgagtgcggcacagattggttttctctacgcggcgatcccgctcggcgcggctattggtgcgttaaccagcgggaagctggcacatagtgcgcgaccagggttattgatgctgctctccacgctgggaagcttcctcgccattggtctgtttggcctgatgccgatgtggattttaggcgtggtttgtctggcgctgttcggctggttgagtgcggtcagcagcttgctgcaatacacaatgctgcaaacgcaaaccccggaagcgatgttagggcggattaacggtttgtggacggcgcagaacgtgacgggcgatgccataggcgcggcgctgctgggtggtttgggcgcgatgatgacaccggttgcttccgcaagcgcgagcggttttggtttgttgattatcggcgtgttgttattgctggtgctggtggagttgcgacattttcgccagacgccgccgcaggtgacagcgtccgacagttaatgcttaaaacagcgccttaagcctatccagcacttgcatggcgctgtagtaatccagacggaacgtctcggttcccagcgcataaacctgcttgttttgtactgcaggcaggtgcgcgagcagcggattagcataaatagcatcggcatctttctgatcaccggcgaacaggaatagactctcgccatttaaccctgcagccagattttccccaccaagctgaatgatgtcatggcgtttaccctgactttggctggcatttaaccctgcgggtaacttcgccagcgtaaagccgagttgttccagcatctgcccttgtgcactttctggcgtccagagattggcactgtgtgcagcggcagtatagacaatggcagtgaccggctgcggcggtaatttgatttgctctttcgccgccgccagttgcttatcaaactgcgcaatccgctctgccgcttgtttctcatgcccggtaatttcgccaagttgcgttaacaggctctgccagcttttgtcgtcgtaattgatgattaatgtcggggcgatggtggaaagctgatcatacagtgccagcgcgctatccccgccggttgcgctaattaaaatcagatccggcatttgcgcggcaacggcttcggcgctcggttcgccgatatagagccgttgcagtttgcgttctttcgccaccttgctccactggcgtaaaaagccctggtcatccgcgacgcggttattcggcgtggtcgcgccgctggcgatcaccggagcatcaatcgccagcagactgccggtcagggtgacgctggtggaaacaatacgctgcggctggctttccagtgtatgtgtgccacggctgtcagtaatctgacgcggccagtcagcggcctgaactgcggctattccactaagcaaaagtcctgttaatagaagggcgttgcggtagagcggggcgagtctcacaaatcagcttcctgttattaataaggttaagggcgtaatgacaaattcgacaaagcgcacaatccgtcccctcgcccctttggggagagggttagggtgaggggaacagccagcactggtgcgaacattaaccctcaccccagccctcaccctggaagggagagggggcagaacggcgcaggacatcacattgcgcttatgcgaatccatcaataatgcttctcattttcattgtaaccacaaccagatgcaaccccgagttgcagattgcgttacctcaagagttgacatagtgcgcgtttgcttttaggttagcgaccgaaaatataaatgataatcattattaaagcctttatcattttgtggaggatgatatggatacgagtctggctgaggaagtacagcagaccatggcaacacttgcgcccaatcgctttttctttatgagcccgtaccgcagttttacgacgagtggatgtttcgcccgcttcgatgaaccggctgtgaacggggatagccccgacagtcccttccagcaaaaactcgccgcgctgtttgccgatgccaaagcgcagggcatcaaaaatccggtgatggtcggggcgattcccttcgatccacgtcagcctagcagcctgtatattcctgaatcctggcagagcttctcccgtcaggaaaaacaagcttccgcacgccgtttcacccgcagccagagcctgaatgtggtggaacgccaggcaattccggagcaaaccacgtttgaacagatggttgcccgcgccgccgcacttaccgccacgccgcaggtcgacaaagtggtgttgagtcggttgattgatatcaccactgacgccgccattgatagtggcgtattgctggaacggttgattgcgcaaaacccggttagttacaacttccatgttccgctggctgatggtggcgtcctgctgggggccagcccggaactgctgctacgtaaagacggcgagcgttttagctccattccgttagccggttccgcgcgtcgtcagccggatgaagtgctcgatcgcgaagcaggtaatcgtctgctggcgagtgaaaaagatcgccatgaacatgaactggtgactcaggcgatgaaagaggtactgcgcgaacgcagtagtgagttacacgttccttcttctccacagctgatcaccacgccgacgctgtggcatctcgcaactccctttgaaggtaaagcgaatagccaagaaaacgcactgactctggcctgtctgctgcatccgacccccgcgctgagcggtttcccgcatcaggccgcgacccaggttattgctgaactggaaccgttcgaccgcgaactgtttggcggcattgtgggttggtgtgacagcgaaggtaacggcgaatgggtggtgaccatccgctgcgcgaagctgcgggaaaatcaggtgcgtctgtttgccggagcggggattgtgcctgcgagcagtccgttgggtgagtggcgcgaaacaggcgtcaaactttctaccatgttgaacgtttttggattgcattaaggagcgaggatgagcattccattcacccgctggccggaagagtttgcccgtcgctatcgggaaaaaggctactggcaggatttgccgctgaccgacattctgacgcgacatgctgcgagtgacagcatcgcggttatcgacggcgagcgacagttgagttatcgggagctgaatcaggcggcggataacctcgcgtgtagtttacgccgtcagggcattaaacctggtgaaaccgcgctggtacaactgggtaacgtcgctgaattgtatattacctttttcgcgctgctgaaactgggcgttgcgccggtgctggcgttgttcagccatcagcgtagtgaactgaacgcctatgccagccagattgaacccgcattgctgattgccgatcgccaacatgcgctgtttagcggggatgatttcctcaatactttcgtcacagaacattcctccattcgcgtggtgcaactgctcaacgacagcggtgagcataacttgcaggatgcgattaaccatccggctgaggattttactgccacgccaagtcctgctgatgaagtggcctatttccagctttccggtggcaccaccggcacaccgaaactgatcccgcgcactcataacgactactactacagcgtgcgtcgtagcgtcgagatttgtcagttcacacaacagacacgctacctgtgcgcgatcccggcggctcataactacgccatgagtagcccaggaagcctgggcgtctttcttgccggaggaacggttgttctggcggccgatcccagcgccacgctctgtttcccattgattgaaaaacatcaggttaacgttaccgcgctggtgccacccgcagtcagcctgtggttgcaggcgctgatcgaaggcgaaagccgggcgcagcttgccagcctgaaactgttacaggtcggcggcgcacgtctttctgccacccttgcggcgcgtattcccgctgagattggctgtcagttgcagcaggtgtttggcatggcggaagggctggtgaactacacccgacttgatgatagcgcggagaaaattatccatacccagggttacccaatgtgtccggatgacgaagtatgggttgccgatgccgaaggaaatccactgccgcaaggggaagtcggacgcctgatgacgcgcgggccgtacaccttccgcggctattacaaaagtccacagcacaatgccagcgcctttgatgccaacggtttttactgttccggcgatctgatctctattgatccagagggttacatcaccgtgcaggggcgcgagaaagatcagattaaccgtggcggcgagaagatcgctgccgaagagatcgaaaacctgctgctgcgccacccggcggtgatctacgccgcactggtgagcatggaagatgagctgatgggcgaaaaaagctgcgcttatctggtggtaaaagagccgctgcgcgcggtgcaggtgcgtcgtttcctgcgtgaacagggtattgccgaatttaaattaccggatcgcgtggagtgtgtggatagtcttccgctgacggcggtcgggaaagtcgataaaaaacaattacgtcagtggctggcgagtcgcgcaagtgcctgaaggagagaacacgatggctattccaaaattacaggcttacgcactgccggagtctcacgatattccgcagaataaagttgactgggcctttgaaccgcaacgtgccgcgttgttaatccatgatatgcaggactattttgtcagcttctggggcgagaactgcccgatgatggagcaggtgatcgcgaatattgctgcgctgcgcgactactgcaaacagcacaatatcccggtttattacaccgcccagccgaaagagcagagcgatgaagatcgggcgctgttgaatgatatgtgggggccgggcctgacccgcagcccggaacagcaaaaggtggtggatcgcctgacgccagatgccgacgacacggtgctggtgaagtggcgctacagcgcgtttcatcgttctccgctggagcaaatgctgaaagagagtggacgtaaccagctgattattaccggggtatatgcccacattggctgtatgaccaccgcaaccgacgcatttatgcgcgatattaaaccgtttatggtggcggatgcgctggccgatttcagccgtgacgagcatttgatgagcctgaaatatgtggccggacgttctggccgggtggtgatgactgaagaattactgccagcacctatccccgccagcaaagcggcgctgcgtgaggtgatcctgccgttgctggacgagtccgatgaaccgttcgatgacgacaacctgatcgactacggtctggatagcgtgcgcatgatggcgctggcggcgcgctggcgcaaagtgcatggtgatatcgactttgtcatgctggcgaaaaacccgaccatcgacgcctggtggaagctactctcccgcgaggtgaaataatggatttcagcggtaaaaatgtctgggtaaccggcgcaggtaaaggtatcggctacgccacggcgctggcgtttgttgaggcgggagcgaaagttacaggttttgatcaagcgttcactcaggagcaatatccctttgcgaccgaagtgatggatgttgccgacgctgcgcaggtcgcgcaagtgtgtcagcgactgttagctgaaacggagcgactggacgcgctggtcaatgcggcgggaattttacgcatgggcgcgaccgatcagctcagtaaagaggactggcagcagacttttgcggttaacgtcggcggtgcgtttaacctgttccagcaaaccatgaaccagtttcgccgtcagcggggcggggcgattgtcactgtggcgtccgacgccgcgcacacgccgcgtattggcatgagtgcttatggcgcaagcaaagcggcgctgaaaagcctggcgttgagcgtcgggctggaactggcgggtagcggcgtgcgctgtaatgtggttagccctggctccaccgacaccgatatgcaacgcacgctgtgggtgagcgatgacgccgaagaacagcgtattcgcggctttggcgagcagtttaaactcggcattccgctggggaaaatcgcccgtccacaagagatcgccaacacgattttgttcctcgcctctgacctcgccagccatattaccctacaggatattgtggtcgatggcggcagtacgctgggggcataagcatgatctggaaacgccatttaacgctcgacgaactgaacgccaccagcgataacacaatggtggcgcatctgggaattgtgtatacccgtctgggcgatgatgtgctggaagccgaaatgccggttgatacccgtactcatcagccgttcggtttactacatggcggcgcgagcgcggcgctggcggaaacgctgggaagcatggccggatttatgatgacccgcgacggacagtgtgtggtaggcacagaacttaatgcaacacaccatcgcccggtgtctgagggaaaggtacgcggcgtctgccagccgctgcatcttggtcggcaaaatcagagctgggaaatcgtcgttttcgatgaacaggggcggcgttgctgcacttgtcggctgggtacggcagttttgggatgaacccgacagaattagatgagattgcaggaaaactcggttaacggagtgatcgagttaacattgttaagttaaatattggtttcaactccgatttacatggttgctgtgttgttaaattgtacaaagatgttatagaaacaaaatgtaacatctctatggacacgcacacggataacaactatgaacaaaagtgggaaatacctcgtctggacagtgctctctgtaatgggagcatttgctctgggatacattgctttaaatcgtggggaacagatcaacgcgctgtggattgtggtggcgagcgtctgtatctatctgatcgcttaccgtttttatgggctgtatatcgccaaaaatgtgctggcggttgacccgacgcgtatgacgccagcggtgcgccataacgacgggctggactatgtgccgacggacaagaaagtgctgttcggtcaccattttgcggccattgccggagcaggtccgctggtggggccggtactggcggcgcaaatgggctacctgccggggatgatctggctgctcgctggggtggttctcgccggtgcggtgcaggatttcatggtgctgtttgtttctacgcgccgtgacggtcgcagcctgggtgagctggtcaaagaagagatggggccaaccgccggggtgattgcgctggtggcctgctttatgatcatggtcattatccttgcagtgctggcgatgatcgtggtgaaagccctgactcatagcccgtggggaacatataccgttgcgttcaccattccgctggcgctgtttatggggatctacctgcgctatctgcgtccggggcgtattggcgaagtgagcgtcatcggtctggtattcctgattttcgccattatctctggcggctgggtggcagaaagtccgacctgggcaccgtactttgactttaccggcgtgcagttgacctggatgctggtgggttacggttttgtggcggcggtgctgccggtgtggttactgctggccccgcgtgactacctctctaccttcctgaaaatcgggactatcgtcggtctggcggtaggcattttgattatgcgcccgacgctgaccatgcctgcgctgaccaaatttgtcgatggcactggcccggtatggaccggtaacctgttcccgttcctgtttatcaccatcgcctgtggcgcggtgtctggcttccatgcgctgatctcttctgggaccacgccgaagatgctggcgaacgaagggcaggcgtgctttatcggctacggtgggatgttaatggaatccttcgtggcgattatggcgctggtttccgcctgtatcatcgatccgggcgtgtattttgccatgaacagcccgatggcggtgctggctccggcagggacggcggatgtggtcgcttctgccgcgcaggtggtgagtagctggggctttagcattacaccagatacgctaaaccagattgccagcgaagtgggtgaacagagcatcatttcccgtgcgggcggtgcgccgacgctggcggtggggatggcctacattctgcacggcgcgctgggcggcatgatggatgtggcgttctggtatcacttcgccattttgtttgaagcactgtttattctgacggcggtggatgcaggtacgcgtgctgcgcgctttatgttgcaggatctgctgggcgtggtgtctcctggcctgaagcggaccgatagtctgcctgctaacctgctggcaacagcgctgtgcgtactggcgtggggctacttcctccatcagggcgtggtcgatccgctgggcggcattaacactctgtggccgctgtttggtattgccaaccagatgctggcagggatggcgctgatgctctgtgccgtggtgttgttcaagatgaaacgtcaacgttacgcctgggtggcgctggtaccaacggcctggctgctgatttgtaccctgaccgcaggctggcagaaagcgtttagcccggatgcgaaagtcggcttcctggccattgctaataagttccaggcaatgatcgacagcggcaatattccgagccagtatactgagagtcagctggcgcaactggtgttcaacaaccgtctggatgccgggttaaccatcttctttatggtggtcgtggtggttctggcactgttcagcattaagacggcacttgcggcattgaaagatccgaagccaacggcgaaagaaacgccgtatgaaccaatgccggaaaatgtcgaggagatcgtggcgcaggcaaaaggcgcacactaaagtcagagtgagggggggatgttggcgaatgttggcttagtgcccagggttccctctcaccctaaccctctccccggtggggcgaggggactgaccgagcgcgttgatagcatttgtaggccggataaggcgttcacgccgcatccggcactctttcagcaacatggttagcggaggccaagatgtttgatagtctggcaaaagccggaaaatatttaggtcaggcggcgaagctgatgattggtatgcctgattacgacaactatgtcgaacatatgcgggttaaccatcccgatcaaacgccgatgacctacgaagagtttttccgtgagcggcaggacgcgcgctacggtggaaaaggcggcgcgcgctgctgctaaatttgtacgtcaggctttaaagctttccacttttttgaacgctgcacgcaacgtatctggtgtcagcgtgactggcaggtaatgaatggactccaccggacgcagggtgtgggcaatcactttgtcgatctccgcctgattattgatatccacttccagctccgccagtgtagtcggcagatgaaaacgctgatacgctccagttaattgcgccagcacatcatcctgacccagcaaggcgctttgcaccagaattccgtaggcgactttggtgccgtggagaaacttctcggtttgcggcagcacggtcagaccgttatgcacggcatgagctgccgccacacgcgtaaaacgatcgcccagaccaccaaccatcccaccaccagcaataatagcatccaccacatcgcaaaaactttgcgttaactgttgattttgctgatcgctcagcgcctgttcgctactgtttaacaagacgtcgcgaatggcttgcgcattattgatccccagtcgcacggttagcggcaacgtttctggttgcggagccagcaccaccgcttcataccatttcgccagcgtgtcaccgatccccgccagcagatattgttgcggtgcattgaggataatctccggttccaccagcaccataaaattggcgtcgtcgaaaatctcataatgcagcgcctgtccggcatcattataccagacggagagcggtgtccaggcggcgcaggtggcggcgatcgtcggaacggcaacaaacggcagaccgagacggcgggcgagggctttcgcggtgtcgagcagtgcaccgccaccgacgccaatcaccacgctgcggtcgtcaccggactcagccgccagttgttgtacatcgctttcgctgcaatgaccgcgaaacaaaatatgctttgcccctggcagtccaaacgctggcggaagtttggtttgcgccgcagcaatggcgcgtttgccgtagatccacaccgcgcgagaaagttgttcatcagtgaaaaaatcgtgcaggtgattgaaacttcctggatgactaaagtagttagccgggccgacgaccacgcggataggattgtgaggcatgttgtgttgtccttattgttttatttagacatctaaacgtcttgattgccaaatactagcatcgtgttatagtgccttcaacacgcaacttcgtcaggtacaataaaaatgacaaataaccctctgattccacaaagcaaacttccacaacttggcaccactattttcacccagatgagcgcgctggcgcagcaacaccaggcgattaacctgagccaaggctttcctgattttgatggtccgcgctatttacaggagcggctggcgcaccacgttgcacagggggcaaaccaatacgcgcccatgaccggcgtgcaggccttgcgcgaggcgattgctcagaaaacggaacgtttgtatggctatcaaccagatgccgatagcgatatcaccgtaacggcaggggcgacggaagcgttatacgcggcgattaccgcactggtgcgcaatggcgatgaagtgatttgttttgatcccagctatgacagttacgcccccgccatcgcgctttctgggggaatagtgaagcgtatggcactgcaaccaccgcattttcgcgttgactggcaggaatttgccgcattattaagcgagcgcaccagactggtgatcctcaacactccgcataaccccagtgcaactgtctggcagcaggctgatttcgccgctttgtggcaggcgatcgccgggcacgagatttttgtcattagcgatgaagtctacgagcacatcaactttagtcaacagggccatgccagtgtgctggcgcatccgcagctgcgtgagcgggcagtggcggtttctagttttggcaagacctatcatatgaccggctggaaagtgggttattgtgttgcgccagcgcccatcagcgccgaaattcgcaaggtacatcagtatctgacctttagcgtgaataccccggcacagctggcgcttgctgatatgctacgtgcagaacctgagcattatcttgcgttaccggacttttatcgccagaagcgcgatattctggtgaatgctttaaatgaaagccggctggagattttaccgtgtgaaggtacatactttttgctggtggattacagcgcggtttctaccctggatgatgttgagttttgccagtggctgacgcaggagcacggcgtagcggcgattccgctgagcgtgttttgcgccgatcccttcccacataaactgattcgtctctgttttgccaagaaggaaagcacgttgctggcagcagctgaacgcctgcgccagctttaattatttaaccgtccaggcgcgggaatattgacggtcggcaaacaactcttgcaggccgttaatttgcttcaggcgcagcacttcgtcgctgtccattcccagctctttgccaattttattatcgtcccatcccaactggctaagttcacggacgatttcgctcatggcggtgatttgatggcgtccacgagcgcgattatgacgaatagtcgcggcgatgcgttgattacgcgtaccttccagacaggtcaccggcaaataaccttttaagcgtaattttaaactactactgcctttaccaatttcatggcggtgaaaaccatccacgatttccatggcatttttatccgtatgtgtgaccacaatgggttgggtaaaaccatctatttcaatggatttttgcagcagttttttttcgggtggtgccacgttgtttgggttgtaatcattaggcataagttggctgtttttaacccacagaacgcaatccactggctcttcacgaaaggggctaacctgatggatcgccatgcggatttcattaatcgctttgatgcgatcatcttccggcaagctggcgagaaattgcgttaaatcctgcgttaatcgttgttgcatagtatcccccattcctgacgttttccttttatccgttcgttataacgctgatagttcttgctttttgtggggctaaaacttaatgcccgacaccagtaatcgttattgagtaaaactttgcatatccgccgccaggaggggatatctttcgcgccaatgtccccttgctgggtttgtggaacctcgatgccttttttctgataccagtgcaaataaatggcgattttattgcggtaatgctcagctgttttttccggcatgctattgagcagcaataatgcatattcttgccagtctaaatgttctggcttgaggattttccgatgcccatagaaatgattgtcatgtccggcgtaaatgccgccactttttaccccgctgactcgtgcgcacatagcagcccagcgatccggttcgataacgtgatagagccataatccttgtcgttgctccgggccaaaaggttcgcaaattcgcatatgacgcagaggaacgcctgcctgatacattaggttatacagtgggttgcagagactttgatgatttgcataccaggtccagatatcagccactttccagtcgtaaatggggtaaatgtaccagctatgaccgcctggtgcggccgtagtccagggtttatcgtcggcaaaacgttgtttatttaaactggcgatggcgacaaaacggttgtaggactcatccgcacggatgccgatcatcatcgccgccggacgtttttgactaaaccattcggcaaactcacgtacaaattgttcgaaggtcatgcctggctggtaaaagcagaaaaagtcagggtcggttatcgcatcttggggaggttgacgtacccattcgacatcaggttcccagcactgccattcgggttggtattgactaagggaattttgcgtcgtaagcgggagcgcaacccagtaaaactcttcgatgacatcggtgtacaactcgcgcagggactgaacatagttaatggtgcaagagaattgcgcctcccagtcgataaacaaaacgcagatttttttgcccatttgtcgggcaagttcggctgtcagatgcagcattaaaccagagtctttgccgccagaaaaactgacacaaacgcggggtagggtgttgagtgtccaggtaatacgctctcgtgcagcttccagaatattgagcggaagaggaattttataaatagacatctgaagacgctctctgaacgttacagggtgatcagtgagataagtctgttaattataaagtaaacactgtaaagcagagtgttttatttttcattcgcgctgtgaataaatagatgaaagttatagtagctgtctgtagttatatatcaaaaactctcatttagacggtcaataaatcgggagaacaccaaattatttaaagaagatttattataggaaatgtaaagctttatactaggtaacggatgttctagttttatctcttttaagttaagaaagtcacggtaggaattataaagttcataggggactattcccagtaaatctgtaactgcaatgctattaatgattgtcagcaaagaggaaccacgaaaactgattttgcgattcataaatctctcgtctatttccatttgaatatcatcaacccctgcacttttagatattaattgggtgaactcttctgccataatttgttcataagtgctattgtcagtaattcgtggatgcctattactacaaattagagtattgcgaatcgtatgcaatggcatgcaaatgacggaacggctgatcactggcatttgggtgatcaccagatcggctttgcggtgaaccaacagttcttcagcattctctgcactcatgaggatatcatggcactcaatctcgacagaggaatcttgccgtaggcagcggatcagcatactattattagagcaagaaatgagctgagggccgtagataataaagtttttctttagttcggacttattgactatattaattgtttgttcaaggcctctgagatttttctcaagatggtgatgcagatttaaccctgttgtcgtcggcgcgataccttttccactgcgaatgaataaagggtcattaaattgcgcacgtaagcgttgtaagctctggctcacggcacttggggtgatatatagactttcagcagctttgctaatgcttaaatgctggtaaatacactcaaatatgacaagaagatttaagtcgaactttttcaagtcgtagagattggccatacactactccggttatatttttcttccatgatatattcacttaatcaatgttttttgcgtatatatttttattgattatgtttttttgcttaactcaggattaagtttttctaaaatagcacagccacttagggcagagcgagcaattcatgcttttttaggatggttgaaaagcagggatatagttcaaccatccatgaattaccttttatttattccccataatgatattaagcgttttctgatcgggcaaccccacggcctgttgtagcgtattttccttactcatgtaatagatagccggcgtgacatttgcccccagatcgtccatcagtttctcattgtcacttaacactttcatttgctctgtacttacgtttgcaggcacgtttagcttaagcttgccaccagaggcttcatattgttgccaggtttttgcgggatctttggaggcaagaattgccgctgctgtcgccgggctttctggcttgataaccccaaccaacaatgttcttaattgcactttgccagaatctacccacgggcgcgcctgctgccagaactgtttacaatatgggcagaacggatcggcgaagacgtagacaatgaccggcgcatcttttttaccgtcgaggagccagtgggattgttccatccgttgccacatttcgcgtccggctggtgcgtaaatttctttttcgataagtgtgttactcaggttttcacctttctcgttgtacatgtaaccagagatagcgtgcttaccatctggagtcaggtagatggtgacgcccatatcctgatactttccgagataacctttcattcctccgggggcatcgaatgttttgatgattgtaatgccctgtttttcaatcgcttttactggagcaggaagttcctctgcgaaggcgattgcaggaagcagagccagtaaaagtatcttttttaacattaatttgtccttttcagtcagtgcaaaagtcgagtaaaaggcataacctatcactgtcataggtaagagcttagatcaggtgattgccctttgtttatgagggtgttgtaatccatgtcgttgttgcatttgtaagggcaacacctcagcctgcaggcaggcactgaagataccaaagggtagttcagattacacggtcacctggaaagggggccattttactttttatcgccgctggcggtgcaaagttcacaaagttgtcttacgaaggttgtaaggtaaaacttatcgatttgataatggaaacgcattagccgaatcggcaaaaattggttaccttacatctcatcgaaaacacggaggaagtatagatgtccttgattaacaccaaaattaaaccttttaaaaaccaggcattcaaaaacggcgaattcatcgaaatcaccgaaaaagataccgaaggccgctggagcgtcttcttcttctacccggctgactttactttcgtatgcccgaccgaactgggtgacgttgctgaccactacgaagaactgcagaaactgggcgtagacgtatacgcagtatctaccgatactcacttcacccacaaagcatggcacagcagctctgaaaccatcgctaaaatcaaatatgcgatgatcggcgacccgactggcgccctgacccgtaacttcgacaacatgcgtgaagatgaaggtctggctgaccgtgcgaccttcgttgttgacccgcagggtatcatccaggcaatcgaagttaccgctgaaggcattggccgtgacgcgtctgacctgctgcgtaaaatcaaagcagcacagtacgtagcttctcacccaggtgaagtttgcccggctaaatggaaagaaggtgaagcaactctggctccgtctctggacctggttggtaaaatctaaatttccttcgtctttcacgccatagcggcgttggcgtcgcccgctcaccccggtcacttacttgtgtaagctcccggggattcacaggctagccgccttgctctgacgcgaaatacttcggaaattcacctaattcttcgggtgctgcggcacccgattttcttccccgcaccatgatgcaagctgcatccaggtagccgcagaggccgcttgcatgatgatgtttaaagcccaggagataaacatgctcgacacaaatatgaaaactcaactcaaggcttaccttgagaaattgaccaagcctgttgagttaattgccacgctggatgacagcgctaaaagcgcagaaatcaaggaactgttggctgaaatcgcagaactgagtgacaaagtcacctttaaagaagataacagcttgccggtgcgtaagccgtctttcctgatcaccaacccaggttccaaccaggggccacgttttgcaggctccccgctgggccacgagttcaccagcctggtactggcgttgctgtggaccggtggtcatccgagcaaagaagcgcagtctctgctggagcagattcgccatattgacggtgattttgaattcgaaacctattacagcctctcttgccacaactgcccggacgtggtgcaggcgctgaacctgatgagcgtactgaacccgcgcatcaagcacactgcaattgacggcggcaccttccagaacgaaatcaccgatcgcaacgtgatgggcgttccggcagtgttcgtaaacgggaaagagtttggtcagggccgcatgacgttgactgaaatcgttgccaaaattgatactggcgcggaaaaacgtgcggcagaagagctgaacaagcgtgatgcttatgacgtattaatcgtcggttccggcccggcgggtgcagcggcagcaatttactccgcacgtaaaggcatccgtaccggtctgatgggcgaacgttttggtggtcagatcctcgataccgttgatatcgaaaactacatttctgtaccgaagactgaagggcagaagctggcaggcgcactgaaagttcacgttgatgaatacgacgttgatgtgatcgacagccagagcgccagcaaactgatcccagcagcagttgaaggtggtctgcatcagattgaaacagcttctggcgcggtactgaaagcacgcagcattatcgtggcgaccggtgcaaaatggcgcaacatgaacgttccgggcgaagatcagtatcgcaccaaaggcgtgacctactgcccgcactgcgacggcccgctgtttaaaggtaaacgcgtagcggttatcggcggcggtaactccggcgtggaagcggcaattgacctggcgggtatcgttgagcacgtaacgctgctggaatttgcgccagaaatgaaagccgaccaggttctgcaggacaaactgcgcagcctgaaaaacgtcgacattattctgaatgcgcaaaccacggaagtgaaaggcgacggcagcaaagtcgttggtctggaatatcgagatcgtgtcagcggcgatattcacaacatcgaactggccggtattttcgtccagattggtctgctgccgaacaccaactggctcgaaggcgcagtcgaacgtaaccgcatgggcgagattatcattgatgcgaaatgcgaaaccaacgtgaaaggcgtgttcgcagcgggtgactgtacgacggttccgtacaagcagatcatcatcgccactggcgaaggtgccaaagcctctctgagtgcttttgactacctgattcgcaccaaaactgcataagaagaagtaagattcacctgcaattgcttagccgccggggtcaaacctggcggcttttttatggcattaaaaagccccgccgggatggctccgggcagggcgggatacttattctggcaattaacgcacaaccagcaccggcagattggcgtggcggatcacgctgctggcgttagaacctaacagatgggtgctaatgcttgggttgcgagaaccaataactacaacatcagcccccagttcttctgccaactcattgacttcatcccgcacgctaccaaaacggacatgttgtttaatgcgggaaggatcgatggtgaagtggctgaccatcgtttgcagacgttcttgtgcttcatgttgcagatgctcttcaaaacgacgcacatcagcggcaaaacggtgcaggctcaggctggcactcccgggtagtacgtgaagtagatgaataactccgtcatcctgggcgaggaattcagcgtggcgaacagctttgtcgctcaattccatttcaaatacatcaactggcataatgattgtcttatacataaccctttctccctgttaatcatgaacaaatcattcgccatgattataatatttatccctgatatttgtctggttctttttccttacgaactgtttctgtgatgaatatattctcactgaacaccaggaattctcccaaaacctgtggtaccgcccgttttcccgctgtgatagctacccttaaagactgactcttttttgaactgtctctggaggttgcatgaaagcattgacttatcacggcccacatcacgttcaggtagaaaatgttcccgatccgggcgttgaacaggcagatgatattattctgcgtattacggcaacggcgatctgtggctctgacctccatctttatcgaggcaaaatacctcaggttaaacatggcgatatttttggtcatgaatttatgggggaagtagttgaaaccggaaaggacgtaaaaaatttgcaaaaaggcgaccgagtggtaattccgttcgtcattgcttgtggcgactgttttttctgtcgattgcaacaatatgccgcctgcgaaaataccaatgcgggtaaaggcgctgcgctcaataaaaaacagataccagctccagcggcattgtttggttatagtcacctgtatggcggcgttcctggtgggcaggcggaatatgtccgcgtccctaaagggaatgtggggccgtttaaagtaccgcctttgcttagtgatgataaagcgcttttcctttctgatattctgccaacggcatggcaggcagcaaaaaatgcgcagatccaacaaggtagtagcgttgcagtctatggtgctggtcctgtgggattgttgacaatcgcctgtgcacggttgctcggtgcggaacagatttttgttgttgatcatcatccctaccgcttgcatttcgccgccgaccgctacggcgcgatcccgattaattttgatgaagacagcgatccggcacagagtattattgaacaaacggcaggtcaccggggcgtggatgcagtaatagacgccgtcggttttgaagcgaaaggcagcaccacggaaacggtgctgactaacctgaaactggagggcagcagcggtaaagcgttgcgtcagtgtattgcggcggtcaggcgtggcggcattgttagcgtaccgggcgtctacgctggatttattcacggtttcctgtttggcgacgcctttgataaagggttgagctttaaaatgggacagacccacgttcacgcatggctgggagaattattaccgttaattgagaaaggattactgaaaccagaagaaattgttacccactatatgccgtttgaagaggccgcccggggatatgagattttcgaaaaacgtgaagaggagtgccgtaaggtgattctggtacccggtgcacaaagcgcagaggcggcgcagaaggcggttagtggtctggtgaatgcgatgccggggggaacaatatgatcgtcaggagtggttttcgaggtaaaggacagccatgacgataatcgccgccataatcagaaatcctatcaggatgtaaaatgcttctgccatggttattcccacaaacgaaacggaataattttgcagcaaaagtgaacagtgagaaccaggaaaaattgctgattttgcgtaaagaggatgcgagtgcatcctctgggcaaagcgagttatcgcttgtgcagatgggattaaagcaggtagtcgccagcagcttctggctggtattcgagttccagcacttcaaggtgggttgcaacgccgcccggaagttcccagtgaatggaatcgccaacgcgcagccccagcagtgcggcacctaccggagccataacggaaagctgagtattgctatcggtcatttttgccggatacaccagcgtgcgcacacgcacttcgccatcgctaagattgcggaatttaacccggctgttcattgtcaccacgtcgtgtggcatctcttctgggctacacatttgggcgcgatccaactctgcgtttaacgcgtcggcgattggcaaaccagcataggcgggttgctccagcagaatatcgatgcgttcggcatccaggtcgttaatgatgatagttggtctggacatttttactccatgtcgtcggtgctgcgagtgtcgcagataaacatacccaaaagaaaaccctcaccgtcaggcggcgagggtttaactcacatgatgatactgactgttgctcactctttgaagtgatttgcgtcacattcagggaattcctcaatgcagcgcattatgtataaatcttaatcgccttggtttatggaagacgaattagcgtgttttgtaaatcagatgattaataacccgctttatcaatcacaaaggttttgccacagttacctgggtgaggttgtggcaagaaactgtttgcagaaagcggagcgttgatggcgtcagctttgatgctgatctgaatttcagtcaaatacgcagggttaccctggcacgttagcttaactgctttcacgttctcttttccccagcttttggcaaaggcggcgtcaaagtcacggcggctcactgttttaccgtaattatccgcaaggaattttccggcttcgctctctttaatttcttgattcaggcgtaccatcgtaccgaagtatgcgtccggatcaaaaccaaagcaggcaccgtgtttggcatattcgtagcgttccaggcaggaacgtccgccagctcctggcatgacttcacttagtttagcggccgtttccagacttaatccggtttccgggctactacacattcggctggcgcgcgcttctggtagattcgggattgggcgagtagcgcaaccgaagcgcatccagcggcgttcatcaacaccacgggcagcaacgcttttaggcaatcctggccacagaccatgtacggtcagaaaatcagctttgttggtcgtttcggtttgcaggcgacattcatctcgttcgttacgatttcgatcgtgttgactctggcaaaatccggtttgccaggagagggccaggacatagcgatcaaaatcgccatactgttttgcctgcaacgctaaggcgttggcagaagagaagggaagcagagaaaccgcgagcaacgcggcgttacgccagaatgctttcataatgggtgtggaactcatacatacactgaatactatctattaaatcataaaaaagcccgccaggtgggcttacctggcgggcgtgatgatttattcagcgtttggcgaacgtattagttccacatggcgagaatcggccagccaaccaacagcaacatagagatgtaaatcaccccgaagattgcgccaagacgccagtaatctttacttttcacatagccacagccgtaaataatcaccccaggaccggttgcatacggcgtcagacagcccatgataccgatagacagcaccagcaggatacacagttgttccattggtacgcccggaatacctttaccgacggccagaataaccggcagcatggttgcggtgtgcgcagacaggctggcaaacaggtagtgtgcaaagtagaacaccagaaccagtacaatcaccgttgcgtttggactgaatccttccaggtgcgtactcatggtaccggcgaaccagtcaataaaaccagaacgagtcaggccgttagccatcacaaccagagttgccaggttgaccagtgtgttccatgcgctgttatagcgggtaatgtctttccaaggcacaacgtgcagggccagcattaggctaactgccagcagaccaaccgcagtagcattaatgacttcactgccaaatacccacaaacctaagctgagcaatacaaggccaatcagtgtccactctctgcgtgtcagcgcacccatggttttcagttcatcacccgcccaggttgccacttcttcactgtgtgtgatttccggtttgtacagcacgtaggaaagccacggcgcaatgataagcaagataaccccaaccggcaggaagcagaggaaccactgcaaccagctaatctggataccggcaattttgctgacgaactccagacccagcacgtttggtgccgcaccggtgacaaacatggagctactcagactggtactaatgaccatcatccacatcaaatagccgccaatacgacgcgcggacggatcgttcgggaaacttttaaacaacggcggcaggtttttaatgaccggaaaaaccgtacccccggtacgcgcggtgttggaaggtgtaaacggtgccagcagaatgtcgataatgacaatcgcataacccaacgtcagcgtgcgtttgcccatgaatttcaccaggaaaagggcaatgcgacgacctaacccggaaacttcataccctaatgcaaaaataaatgcgccaaataccagccataccgtggtgctggaaaaaccagccaggccccatttcagcgcctgtttttgcgcattaaacgctgggtcagctaattctttggcatcaaagagcaggtaattactgccaataacgcaaatagtaaccgcaataaaactgatcgctgttgccggaattggctcgaggatcatgccgacaatcattgccacaaacacagcgaagtaatgccatgcctgcggcggcataccgtcggggacagggataagaaacatgacacccatcaccaccagtggggccaatagtttccatatattatcttttgctaaagacatacgggttctccgaaaattaatatttccaaatttatcaagtgcttaaataattaaatctgtgctaaaaaccaggtaaggatcagtaggtcagcactgccgcctggactgagatttcgttcgatacactccctgtcgaactgccggagataatcgagatcggcgggggttcgaatgccccctttttgcaataatgtttgcgcctcgcgctgtagccagcgcaggcccccctcgccaccgcggcttgcaacgttggtatcgccgttgatcgccatcagtaggagcaaggtatcgagcaatgccagttcaggatctaacccctgatccagcagagtgaggtaatgcggcaaggcgtgattgatcaccagtggataacccgcttcggcttcaccgcgtgcgccggtaaggccaagctgttggtacaaccgttgacctgccgtcagttgactattattggtacgcagttcgcgatcggtcaggccacggcagaaacttgccgccgtagaacaaacggttgttggcgttaccggttggttgagttgaagcaaacggccaattgccgcacatagcagccctaaagaaaaaatgctgcctttatgcgtgtttacgcccgcagtggcgcggaacatatcaccttcgcaagccataccaattgggcgtaatccgtggagtaccgcttctggtgccatttccgcactacaggcaccaaattcaatgaaacggggtagccagccctgaatcgccagcgcgctgcggtggaaatcttccagcgccatatctttgtgcgcaccgcagttaatgcgatccacgaggcctggtttcggactcagattgacttcagtcagcatggcgcgccagcccagcagggcgtactcatcgattaaactcgtcgcaagctttgtggttttagtactcgttgcaggcatgctcatcgttcagcagtgcctccatgttatttagttgacgttgcaggcatcgacatcgttcagcagtgcctccatgcggttgagtaaatcggtcagttgatgggtttttccacgcgcgcagacggctgcgctttgttcgcacaacaggcagcggcgaggcggcagactatagtcgcggcgggagagaatttcgccttcgggcgtcaggacatcgatatcccataaccgcccgagaggatgactatgttcaagctcaatggtggcgagcttgaggtcgcgagccggggcggcaatgctcaacatgccctccggcccgctggcggaaaccagtgcagcctgctcctgaatttgccagccctgttttgcggctaaggcacgcaaggctgtcacgccatgattaaaaattcggcgtgtgacctcgctgtctttaatcggcccaggcgcaaccacggtaaaggagaccagtggaacaggatggcgcttgagccagacgtgttgccgtgcttgcctttcatcccggctgacgagcagctcgggaatacttaccgcatggtggctggcgagttcaggaagcaggtgcatggcttattccttcacctgatgcacaacatcgatcacgctgccatcgcggtaacgcacaacggcaacgacgcggtctgtgaattcaatcggctgtggttcaccggtcagcagacgcgcacgttcgcgcagccactcaatggaaaccactttaatgcccgcttcctgcagacgttctgccagttccggacgtgccgggttaactgcgataccgtggtctgtgaccagaatatcgacactggagcctggggtgatgcaggtcagtacgttatccaccagagtcggaatacgaccgcgtaccagcggcgcgacgatgatggaaagcgcagaggcaatcgcggtatcgcagtgaccaccggaagcaccacgcagtacgccgtcagagccggtcagcacgttaacgttgaactgggtgtcaatttccagcgcgctcagtaccaccacgtcgagacgatcaacgcttgcgcctttgctaccccagttagcgtactggttggcgctgatttcgatgtgattggggttacgggccaggctttgcgcagcatggctgtcaaagctctgcacatccagcagtttgcggatcagacctttttcgtgcaggtcaaccatcgtcgcggtaataccgccaagggcgaagtcggcgcgaatatcgcggctacgcattttgtcttccaggaaacgggttaccgccaggcttgcgccgccggtgccggtttgcatggagaaaccttctttgaagtagccagagttgacaatcacatccgcagcgctacgggcaataagcagttcgcgcgggttagtggtcatacgggtcgcgccagcgccgatttttgcagcatcgccaacgcggtcaactttgacgatcaaatcaacctgatcttgctcaatgcttgccggattatgcggataaggcagcagttcttcggtaagcatcacgacctgttttgcgttgtcggcatcaactattgcatagccgagggagccgcagcaggctttaccggtgtagccgttggcattaccgaattcatcacaggacgggacgccgaggaaagccacgtcgatattcagttcgccgctctgtaccagatgcacacgaccgccgtgagagtggatctgcaccggttctgccagcagaccacgggagatctcttccgccagtggaccacgcaggccggaggtataaatgcgggtaaccacgccctggcgaatgtgttctaccagcggcgcatggcaatcactcagggagctggacgccagggtcaggtttttaaagcccatcttcgcgatgacgtccatcaccatattgacggtcaggtcaccgccacggaaagcgtgatggaaggaaaccgtcatgccgtcctgtaaaccagagcgacgaatcgcttcttccaggttggcgcacagtttgcgatcgcgcgctttttcagcctggtaggtttgctttgggctgttctggaaagcggcaagatcgcattcagcgcgacgattccaggccgctacccgttcttgtcgttgagattgttcaattttctgcgtcattttgattgccttattcttcgcggatgccggaaagttctgcacgggagagcaccagacgggcgcgatcgataaccggaccgtccaccatcttgccgttcagggaaaccacgccgaggccttcgcgagcggcggcttcagcggcttctacgacgcggcgggcgtgatccacttctttctgggtcggtgcgtagaggttgtgcagcagatcaatctgacgcgggttgatcaggcttttgccgtcaaagcccagctgtttgatgtgggcggcttcttgcagaaatccggcttcgttgttagcgtcggaatagacggtatcgaacgcctgaatacccgcagagcgcgcggcctgcaaaatggaacagcgtgcgaacagcagttcagttccttccggggagcgttctgtacgcaggttgcgcacatagtcttctgcaccgagggcgataccgatcaaacgctcggaagcgtgagcgatttccactgcgcgggtaatccccagcggagattcaatcgccgccagcaggccggtgctgccgggttcacgaccacaggctttttcgatacgcaggatctctttttcaatatccagaacatcctgagcggtatcggttttcggcagacgcacaacgtccgcaccaccgcgaacgacggcttccaggtcgttaacaccccattcggaatccagcgcgttgacacgcacaatggtttcaatatcgcgatacagcggatgttgcagcgcgtggtaaaccatgcggcgggcggtgtctttttcacgcaatgctacggagtcttcgaggtcaaacatcagggcatcagccgggtagatgaaggagttgctgaccatcgcggcattggcaccaggcacaaacaacatgctgcggcgggtgcgagttttacgttgttgcaggctagcggaaatcattggcaatcctcccatggcagagccgggataccgctggcgcgtgccagcagggcttccagtcgtgcacgtaaaatgcagtacagtgcgcctttgtcatcgacattcagctgtacgccgcgcacgttgtagcgggcgagaacgtccagaatggtggtgcgaattgcatcgccaaactgtttctcaacgctgctattgatttgcaggtcgatatcctgcgtatcgagtggggcgatgcgtatcatcacatccccagactcaagggtgcctgcaacggcgggctggtttattttcatttttcacctgtttctcatgcgggggtcttttgacgagctgccgcgtcctggcgggagtgctcaagcaggttctgcaaataatgcagcgtgactgcagggaccagcggcgcgatagccgtgagatcgtttttcgccagcagttgacgtacccgggaagcggatatcggcatctcctggtaacgcagccgctcaatttcaaccagttcgatgggcggtgcggagatagtcggcgtttccagccagtagcgcatatcctggttgtactgggcggtaacgcgacaaaagggttcagtaccgacaaagcggtgagttacacccagcgcgggagcgaggtactgacggaaaatcttcagatcaatttcggtgtaacaatggttaatgacgctctgttctttaatgaagtagcaagggaacgtagcgcgggagatgatgtattcggagccacgatgcacagtcaggcgtggaatatcggcggtgccttttaacaccaaatccagccggtcttcataggggaagcgactagaatcttctttgactaaaaacagatgcaaccagtcgcactgtgccgcagcctgttgaatcagataacggtgaccattcgtaaagggattggcgttcatcacaatgcagccaatcttgttccctggatgacgaaattttttcaggctttcggcatagcgtttcagtcgcgtggcgctgttttccatcagcaccatcacgccgggtacgctggtcagcgtggaaaaaccgcactggcggaacagcgcctcgtattcggttttggtataaataaacagatgcgtgctgtgccgctcataggcgaggtttatcaattcagtggctaatgtcagcgccagtccttcaccgcggacggattcactgatagcaacgcatttaataatatttccggcaattccaccgcacgcgataagcttttcatcgcgggttacggtaataaatacttcgactgtggtgtcaacgctcaaatcattttcatgcaggaattgggcgatttccgccatttttttattttcactacgttttacgcgggtgaaaatatcattgccgaacataataaatagtatcctgaaggtgcatgttgttatcgatttgcaacgaatgttgttcaatgttgcaaactgataaccttttattttcacttgggagaaagggggtgatcgaggtatatctttttctcctttcgctatacatcctaaggagtatttcggcgtgaaattttgatttatttcacatagagttagtggttttttatttatttaatgattttaagttttttaattaatgtaattacgaaatgactcgcaggtttaagtgatttaattgatttaatgaataaaatttgccacgatcataattaatatctatgtattttgattcaacattttaattacatccgtcaaagaggctcgggacaacccgcaaggaaaacaatgttgcagcttaacgagaataaacagtttgcatttttccaaagactggcatttccgctgcgtatctttttgctgattctggtgttcagtatatttgtcattgcagccctggcgcaatattttacggccagttttgaggactatttaacgcttcatgtacgcgacatggcaatgaatcaggcgaaaattattgcctccaatgacagtgtcatctctgcggtgaaaacgcgtgactacaaacggctggcgaccatcgctaacaaattacaaagagataccgattttgattatgtggtgattggggaccggcacagcatccgcctttaccatcctaatccggagaaaattggttatcctatgcagttcaccaaacagggcgcgctggagaaaggggagagctacttcattaccgggaaagggagtatggggatggcgatgcgcgccaaaacgccaatctttgatgacgatggaaaagtcatcggcgtggtgagcattggctacctggtgagtaaaatcgatagctggcgggctgagtttttattaccgatggcaggtgtgtttgtcgtgctgttagggattctgatgttgctgagctggttcctggccgcgcatatccgtcggcagatgatgggcatggagccaaagcaaatcgcacgcgtggtccgtcagcaagaggcgctgtttagtagcgtttatgaagggctgattgcggtggatccgcatggttacattaccgccatcaatcgtaacgcaagaaagatgctggggctgagttcccccggacggcaatggttgggtaaacccattgttgaagtggtcaggcccgccgatttctttaccgaacagattgatgaaaaacgtcaggatgtggtggcgaactttaacggtctgagcgttattgccaaccgggaagctattcgtagtggtgatgatttgctgggggccattatcagctttcgtagtaaagacgaaatttccaccctcaatgcgcaactgacgcaaataaaacaatacgttgagagccttcgtacattgcgacacgagcatctcaattggatgagcacgctcaatggtctgttgcagatgaaagagtatgatcgcgtgctggcgatggtgcagggggagtctcaggcccagcaacagcttattgacagcctgcgcgaggcgtttgccgatcgccaggtggcggggctgctttttggtaaagtgcagcgcgcccgggaactggggctaaaaatgatcattgtccccggtagccagcttagccaactgccgccaggactggatagcaccgagtttgcagccattgtgggcaatttacttgataacgccttcgaagccagcctgcgtagcgatgaaggaaacaagatcgttgaattattcctcagcgatgaaggcgatgatgtggtgattgaagtcgccgatcagggctgcggcgttccagagtctctacgagacaaaatatttgagcagggggtcagtacgcgtgctgacgagcccggtgaacatggcattgggttgtacttgattgccagctacgtaacgcgctgcggtggtgttatcactctcgaagataatgatccctgcggtaccttatttagtatctatattccgaaagtgaaacctaatgacagctccattaaccctattgatcgttgaggacgaaacgccgctggcagagatgcatgcggaatatattcgtcacattcccggattcagtcagatattactggcgggaaatctggcgcaggcccgaatgatgatcgagcgttttaagccggggctaatcttgctcgataactatcttcctgacggtagagggattaatttactgcatgaactggtgcaggcgcattatcccggcgacgtggtgtttaccactgcagccagcgatatggaaacggtgtctgaagccgtacgttgtggtgtatttgattatctcattaagcccattgcctatgaacggctggggcaaacgctaacccgtttccgccagcgtaaacatatgctggaaagtattgatagcgccagccagaagcaaattgatgagatgtttaatgcttatgctcgcggtgaacctaaggacgagctaccgaccggcattgaccccttgacgctaaacgcggtgcgaaaactgtttaaagagcctggtgtgcaacatacggcagaaacggtggcgcaggcactgaccatcagccgcaccactgccaggcgttatcttgaatattgcgccagccgccatctgattattgctgaaattgttcacggcaaagttggcagaccacaacgcatataccacagtgggtgacatgataaagccggaggaaacttgcctccggcattactatttacttgcctgtgaccgctgctgccgttcctggcaccatcagctctgtagcaacgataacaatcaccaaaccaacaagcaccggtacgctggtgcgttttacgacttcaaacgggctgatcttcgccatcccggcaaccgcaacgactacgccagaaacggggctaagggtacggccaaggttactcgcctgcagcatcgggatagtcaaatacgccgggttaatgccggaagagtgcgccagtttcgggatcatctcaacaaacgcataaaacggcgcattgccactaccggtcgtgactgccgccagcattgtcagaatcaccaataccagcatcaggatgatactcgcgctaccaaagctggtagcgatagaaatcagactttgaataaagccgatggtgctaagcccctgagcgaataccccagcggcaaccagcagcatcaccacgttagcaaacgcatctgccatcccgcgataagccacttccagaccagagaaaactttctgggtattaaagctgcggaggaactccagaatggaggcaatcagcatacaaatcaccagaatagtgatgatgtgtaattgcggaccccatttaccgtcaaaaatcagtacaccgatgatcggcgtgaacggcaaaatggcataaaacgcaggagcagtggtggtgatttcactgacatctaacatttcatgagagatgtgctcttttttatccagataacgttgccagaagaagtgggcgatcgccatgccgataattgcagcaatactgataggcagcgtcgttttgaaggcgaagtcaatcaggctcatttcggaagcttgcgccgccagcaccacatccccactagtcggtgcgagaataatcgccgccggggaggcacaaatggcagcagctgcgccacgactgataccaacgtttaccatcaccggaaatagggttgccatcagcaaaacacccagaccggttgcggaagagacggccagagacatcagacaggcgacaaaataggcggcaatcatcagcaggtaaggggagttaatatactgcaatggtttactcgccagcttgaccaccatatcattcgcgccgatatgggtcatgtaagcggcaaatccacacagcatcataatcatcatgccgaggtcgccgccgcggctcattagtaatattttaacgtattcaacgatatccgtggcgctgtagcctgtactagcctggctggacggtaacactttgtgccccataatggcactgataatcagcaataacaggccaccgacaaataacacaccagtggcggaataccctttaatgatgtagcgagctacacccacaataaccacaaccccaataaggagctcaatgaatgtcagcataatttttcctgtctccaggccccaaagtaaataataaaaaattcctaaagcttaaggaaaaaatatgcccaataaattggcgatgaatgctgattaaaatcaagaaaaactgccattaagacattgaagttgctgtttttatacatagataacaaaacgcatatttagcggttggcaattatcacataataatgtgtgcaaattgatggtggattgatgcaaatttgttaattgcaatggtgttagctgcggctgtgcgctcaaaaaataatctaatatgagcataggttgacgatatatattatatacttcgttaagatgattgttgtatctcgttaaaaaataaaataatttttccttgattgcattttgtcatcaaaaaagacttggtttttcttttttgactattcccatcgcagaaaacgacgcatcatctttaatcgatgcgcggaaatatttaacttgaacaagcggaaataaatagagcagctattcagattattctttatgttgggtctattaaggttatgttaattgtagctttgctatgctagtagtagatttttgataaatgttttatggtcacaaatgaacgtgagtaaatatgtcgctatcttttcctttgtttttattcagttaatcagcgttggtaaagtttttgctaacgcagatgagtggatgacaacgtttagagaaaatattgcacaaacctggcaacagcctgaacattatgatttatatattcctgccatcacctggcatgcacgtttcgcttacgacaaagaaaaaaccgatcgctataacgagcgaccgtggggtggcggttttggcctgagccgttgggatgaaaaaggaaactggcatggcctgtatgccatggcatttaaggacagctggaacaaatgggaaccgattgccggatacggatgggaaagtacctggcgaccgctggcggatgaaaattttcatttaggtctgggattcaccgctggcgtaacggcacgcgataactggaattacatccctctcccggttctactgccattggcctccgtgggttatggcccagtgacttttcagatgacctacattccgggtacctacaacaatggcaatgtgtactttgcctggatgcgctttcagttttgagacaaatgaagttttagtaacttctttaaaatcaatagctaaaataagtaacatcaaaaataacgcgacttttatcactttttagtaaagttacactggacaaagcgtaccacaattggtgtactggtaaccgacacagcatttgtgtctatttttcatgtaaaggtaattttgatgtctaagattaaaggtaacgttaagtggtttaatgagtccaaaggattcggtttcattactccggaagacggcagcaaagacgtgttcgtacacttctctgcaatccagactaatggttttaaaactcttgctgaaggtcagcgcgtagagttcgaaatcactaacggtgccaaaggcccttctgctgcaaacgtaatcgctctgtaagatacgtcagcaagaattcaaaacccgcttaatcagcgggttttttttggtctttagtgtgcggtactggcgctaaacagccagaatgccagtgcggtcatggcaaaagaccccagaaggttgacgaaaacgttcagtaatgcccagccaaagcggccctcttgtaacaaaaacaccacttctgcgctaaatgtactgaaggttgttagaccgccacaaaatccggtggtgattaatactttccacactggatcaatgttcgtcatcctgctgaaccatgcgaatcctattcctatgatgaatgccccaatcaggtttgctgtcagcgtccccaacggaatcgcctgatgcagtgggttaaatcgcatacttaacagccatctcgccacgcttcccgtaccaccgccaataaaaactgctaaaagaagttgtaacactgcaaaatcctgctatttgatttgtatgagtgataagtgtaacgccgaataatcgtcgttggcgaattttacgactctgacaggaggtggcaatgctggttgccgcaggacagtttgctgttacatctgtgtgggaaaagaacgctgagatttgtgccagcttgatggcgcaggcggcggaaaacgacgcaagcctgtttgccctgccggaagcattgctggcgcgcgatgatcatgatgcagatctaagcgttaaaagtgcacagctgctggaaggcgaattcctcggactttacggcgagaaagtaaacgtaacatgatgacgacaattctgacgattcatgttcctagtacgccggggcgcgcatggaatatgctggtggcacttcaggcaggaaacatcgtcgcccgttatgccaaactgcatctctatgatgcatttgccattcaggaaagtcgccgtgttgatgctggtaatgaaatcgctccgttactggaggtggaagggatgaaggtcggtctgatgacctgttatgacttacgctttccagagctggcgctggcacaggcattacagggagctgaaatcctggtacttcctgccgcctgggttcgcgggccgctcaaagagcatcactggagtacgttgcttgccgctcgtgcgctggataccacctgttatatggtggcggcgggggagtgcgggaacaaaaatatcggtcaaagccggattatagatccctttggcgtcaccattgcggcagcgagtgaaatgcctgcactcattatggcggaagtgacgcccgaacgtgtgcgtcaggtgcgcgcgcaactgcccgtcttaaacaaccgtcgctttgcgccgccgcaattattatgatgtttttttactcggcgcttgattcaccttgttacagattgctattgtgtgcgcgcgtcgaatgaccgttaatattctctggtttttaaggcgcgttctgttgccggttatatgtcaagaaggtatctatgggtgagattagtattaccaaactgctggtagttgcggcgctggtcgttctgctgtttgggactaagaagttacgtacgctgggcggagaccttggagcggccattaaagggttcaagaaggcgatgaatgatgacgatgctgcggcgaaaaaaggcgcagacgttgatcttcaggctgaaaagctctctcataaagagtgacgtggcgagcaggacgctccctcaatatcttgttcgatacaaaaaacccgcttcaaaaagcgggttttttatcagacagatgtaagtaattattacaggattacttaacttccatccctttcgcctgcaaatcggcgtggtaagaagagcggacaaacggaccgcatgcagcatgggtaaagcccatcgccagcgcttcggctttcatttcgtcgaactcatccgggctaacgtaacgttgaaccggcaggtgatggcggcttggctgcaaatattgccccagcgttaacatcgtcacaccatgacggcgcaggtcgcgcattacctcaataatttcttcattggtttcacccagtcccaccatcagaccagacttggtcgggatttccggatgcgcttctttaaagcgttccagcagcttcaggctccagttgtaatctgcaccaggccgtacctgacggtaaatacgcggtacgttttccaggttatggttgaacacatctggtggcgttgcagtcagaatatccagagcacgatccatacgaccgcggaaatccggcaccagagtttcaattttgatttgcgggcttttttcccgaatggcagtaatgcaatccgcaaagtgctgggcaccgccatcgcgcaggtcatcacggtcaacggaggtgataaccacataacgcagcgccatatcggcaatggtctgcgccagtttcactggttcattggcatcaggagctaccgggcgaccgtgggcaacatcacagaacggacaacggcgggtacaaatagcgccgaggatcataaacgttgctgtgccgtggttgaagcattccgccaggttagggcaggaggcttcctcgcagacagaatgcaggccatttttgcgcattgcggctttgatgccctggatacgtgtagagtccgctggaagcttgattttcatccattccggcttgcgcagcagggcttcgcgctctgttgccacgtttttaaccgggataagggccatcttatcggcatcgcggtatttaacaccgcgttccatcacaatgggtttactcatagcgtgcgtgttccagttgcgaattacgaaggaaagcgtttcaattcaatagattgttgtaattatcaactatttttgaattaacgactggcagtatatcattgaaacggacctgaaagcagccaaagcggtcgcgaaaatgtaaaattgttgttggattgtgccattttatcgttctgcgctgtgatctggctgtaacaatactttttcaaaatgcattacggataacatctattactccgtgcaggatgggatcacgcaggctgaatttgttgtagtggatagagaaatctatttgctcctcatttaaggacggaaaaggcagtttttccagcggccagcagcggctaaacaggttataaaaacggctgggaataatcgctaacatgtcactgttggcaaccagtgcagcgattgtcaaaatgttgtagctggtgaaattgatttgccggtccggaaacatttcttgaactctctgccgcagaccgctgaaattttgctcttccggtaacagaagtacatgcgcagcgttgtcgatagtctctctgtcatcttctaaagagagtagtggatttccctcgcggcaaattaacaccatattgtcggtgaacagaacatgatgttgcaccgtacgattggtgcaaaacatgttatcgatgatgagatcggtttgaaactgactgagttggttttccgcgtcgctgatgggcgggttgcgcagtaaaagctgcggatagtgagttttaatcgcccgatagatgacaggaaggaccagtgctccgacgctgggagtggtcgcaatagttatcgttcgttgcttatcatagcttccttcgatatccagcgcgccaagaatggactcaaggccctgactgatatactcatgtagatgcatcgcaaatgcggtaggagtgacaccctggcctttgcgaataaacaatgggtcagggaatataacgcgcagtttctgaatagactgactgattgcgctgggggtcagattaagcactttcgctgcattaacgatccctttatgtacatatacagcttcaaaaatagtcagaaggttaagatcaatatttcgtaaggttgtaaatatttgtggtttaccttcactgctctttctgcttaaacagggttcaatttgattattactatccacgcacttactccaattttattcatggaaaaataatatttaaaaaattacaataatcttatgtctaattggaacggaacgcttttgctcaccataatcaactatttcaataggttaatcaatggggtgagttacggagcaaggcgtggcaccgcatttctgcaagtgataaagaaaatatacaaacgcgaaggagatgtaaagcattagcagatattatgagtaatgacccagtgtaaattgggccattgatgtatggaattaagcggtaatatattcgaagtccggattgtttagtagcgctaaaatattttccagtaaacgtggagcaatattattagtcgtcgcttcgggtttccattgacttattttagccatttccattccggcatacccacaaggattaatacgtaaaaatggactaagatccatattgacgtttaatgccagaccgtggaaactacaaccgcgtcgaatacgtaaacccagactgcaaattttcttttccccaacatagacacctggcgcgtcagcccgaggatgcgcttctatacccagttcagccagggtattcaccactgtttgctcaagcaaggtcaccagttcacgcacaccgagtttacggcgtttcaggttaagcaacacatacatcacctgttgccccggcccgtgataagtcacctgcccaccgcgatcgctctggatcaccggaatatcacccggcattaaaatgtgctccgcttttcctgcctgaccttgggtgaataccggatagtgctcgaccagccagatttcatcaagggtactatcatcgcgggtatcggtgaattcatgcatagcctgggagattggctcgtaaggctgaagaccgagctggcggacaagaattttatcctgatacaaaacggcatctccgtggagaatgagtaaaagtgggggaaaagtatatcacagcgaggagaggggagttacccgaccaggagccgggtaacggagaagcgagttacagaaccatgcggacaatatcgattttgcccagttcttcatacagtgtttcaacctgctcgatatgagtggcgttgatagtgatagatacgctgtggtagttgcctttgctgcttggttttaccgttggggtgtagtcacctggcgcatggcgctgtaccacttcaaccacctgatcaaccagctcaggtaacgcctgccccataactttgtaagtaaaaggagtagggaattcaagcagttcgttaagtttggttttcatgtcagctccggcgtaacgtaattaaatagcaactcccgccagaaggcgggagttttttactgatgcttagtatatggggacggaaattacactttcaagtgtttaatttttaaccaaaccagtgatggaacattaatttaatgtaatcaatgattttgccgaagaagttaccttccgggatttcttgcaacacaaccagcgggcgttgctcgatcgttttgccatcaagctggaagttgatagttccgacgacctgattcttttgcagcggcgcatgcaattcactgctgttcagcacatagctggctttcagatctttcatgcgaccacgcggaatggtcaggtacacgtctttatcaacccctaagctagcgcgatcagaatcaccaaaccaaaccggttcagaggcgaactctttacctactttcagtgggttaacggtttcaaagaaacggaagccccaggttagcagttttttactttcggcttcacggcctttaaaagtacgtccgcccattaccgcagaaatcaagcgcatctggccttcagtcgcagaagcaacaaggttgtaacctgctttgtcagtgtgtccggttttgatgccgtcgacattcaggctgttatcccataacaggccgttacggttcagctggcgaataccgttaaacgtaaattctttttctttatagatgctgtattcattcggtacgtcacggatcaatgcctggccgatcagcgccatatctcgcgcggagctgtactgaccatcagcatccagaccatgtaccgtctggaagtgggtatttttcaggcccagtgcgttaacgtagctgttcatcaagccaacaaaagcgtcctggctaccagcggcaaaatcggccatggcgacacaagcatcgttaccgctttgcaggttaataccgcggatcagctgagaaaccggaacctgcatgcccggtttgaggaacatcaggctagaacctttaaacaccgggttaccggtggcccatgcgtcgttgccgatagtgactaaatcagtttctttaaatttaccggctttcattgcctggccgataacgtaactggtcatcattttggtcaggctggcaggatcgcggcggacatctgcgttctgttcggcgagcactttgccggagttatagtcaatcaggatgtaggactccgcatcgatctgcggtacacccgggatcatagttttgatattcaggtcatcggcatgtgcagcagagataaaggctgtgcaaagagccgtggtgagcgccaggcgcttcatgatacgagcggaaaaaatggtattcatggtctgaactacgacatccgtgatggaattaaaaaagtgccctactatagcaaatgcactaccggcaggcatctgactttccgcgtgactttgttaacgtcatttacagaaattgacacatcagatgcctgctttacgttactgcgcggtagtaataaaactctgtaattgggcttcggtttgcaaacgttgctgcaaggtactggcttcggctttgctggcgaatgggccaagctggatccgccagaccgcgccattttgagttacgcgaccggggacgccgaacttctgtcccagttgctgttggtactgttgcgcacgagcctgatcgcttacggccccgacttgcaccataaagttgccgctggcgctttggctgacggcttgcggtgtcaccattgcagggctggttgcaggcgttgtgctcggagctgtaacaacgggctgtggcgcaggcgtcggttcgctgccttccagtacaccaggcgctaaggtcgttggtgcgccgaggaaaccgctactggttaccggcgcgccggtcggatcttcgctttttagcgtgctattactgaccggaagaatgtcaccctgcgggccagacacactacttgttcccgcgccaccgcttaaatcgggaggtgcaggcagggcgtaagtctgtttggcgactgtggtacaagccataccaggaccagaaaggctaccatcctgggcaacaataatcggatcgatacgaactttggtgttgttactcgtgttaagacggtcagctgccgcgcgagaaagactaataacgcggtcgttgccgtaagggccgcgatcattaatgcgcaccacgatcattcgcccgttagccaggttagtgattctggcgtagctggggatcggaagcgttggatgggctgccgtcagctgtgtcggatcgaatgcttcgccagaggccgtcaggttactgccgggttcggcatcatagattgccgccagtcccgcctggctaaatcgagacggatcctgcacgattttgtagcttttaccgtcgcgctggtaatcctgatttgccgtcgcgttcagtggttcgaaacgcgggtccgccccgctaatttcaactatagggccgttacataccgcaggctgcggtacacttaccgtctgttgctgaccatcatcgcttgtacatgccgcgagcattcctgccgcgatgcagatcccgagccactgcttacgcattgcgcacctcttacacgcttttgctcaacattttcctgtgggtgtggatactcattacaatcccgaacccagccatcagcacaattagcgcgcttcctccataactgaccagtgggagcggaacccctacaaccggcagaataccgcttaccataccaatatttacgaagacataaacgaataatatcagcattaagccgccagccatgacgcgaccaaaggtggtttgcgctctggcggctatccacagcccgcgcatgatcagcagaatgtagagagcgagcagaatcagaatgcccactaatcccagctcttccgccagtaccgcgaagataaagtcagtatggcgttcggggagaaattcaagctgactctgagtgccgtgcagccagcctttgccgcgtaatccgccggagccaatagcaattttagactgaataatgtgatagcccgcgccgagtgggtcactttccgggtccaggagcatcattacgcgctggcgctggtaatcatgcatcaggaagaaccacagaatcggaatgaacgccgctaccagcactactgcgacgccaatcagacgccagctaaggccagagaggaacagtacaaacagaccggaaagcgcaacgaggatacttgttcccaggtcaggctgtgcagccaccagcagcgtgggcataaatatcagcaccagcgcgatgccagtgttcttcaagcttggcgggcaaacgtcgcggttgataaagcgcgcaaccatcagtggtacggctattttggcaatttcgctcggctgaaaacgaacaataccgaggtccagccagcgttgagcacctttagagatggcaccgaaagcatctaccgccaccagcaaaataatacagatgatatagagatagggggcccagccttcataaacgcgtggaggaatttgcgccatcaccaccatgatgaccagacccatcgcgatttggccgattttacgctccatcatgccaatatcctgaccgctggcgctccagataaccagggcgctgtaaaccagcaatgccagtaagatcagcagcattgtgggatcgagatggactttatcccagaatgtttttttattcggattatccgtcatgattaatggtcctccgctgcggcaaccgctggattttccgcaggcagatcggtgttgttatcacccagcataatgtggtcgaggatctggcgcatcagtgtaccaaccgccggacccgcaccaccgttctccagaatcatggcgacagccacttgcggattgttgtatggcgcaaaggcggtcatcagtttgtggtcacgtaaacgctcggcaattttgtgcgcattataggtttcgttcgctttcagaccgaagacctgagcggtaccggatttcgccgcaattttgtacggtgcgctagcaaagtatttatgcgccgtaccgttagggcggttagcaacaccgtacataccgtctttcgccagctcccagtaaccggaatgaatatcgccgacgggcggttcatgcggctgtacccatggcacctgtttgccgtcttcggcggtgctcatcagcaaatgaggaaccttcacgataccgtcattaatcaggatcatcagtgccttactcatctggattggggtcgctgtccagtaaccctgaccgataccaaccggaatggtgtcaccctgataccacggttttttaaagcgtttctgtttccattcgcgggtaggcatgttgccggaacgttcttccgccaggtcgataccggtgtaatgaccataaccgaatttacccatccattcggagaggcgatcgatccccatatcgtaggccacctgatagaagaaggtatccgcagattcttccaggcttcttgtgacattcagacgcccgtggccccattttttccagtcacgataacgtttttcgctacctggcagttgccaccagcctgggtcaaacagcgtcgtattgcgcgtgatcaccccggcgctcaatgcgctaaccgccacatagggtttaactgtagacgcgggaggataaaccccctgtgtggcgcggttcaccagcggtgtattcggatcgttcaacaaggcggaataatctttgctggagataccgtcaacaaacaagtttgggtcataactaggcgtggaaaccagcgccagcaccccacctgtacgcggatcggtgactaccacagctgcgcggctacccgccagcagcgtttcaatatattgctggagtttgagatccagcgtcaggtaaatatcgtgtccggcttgcggtggtacttcttttaactggcgaataacacgcccacggttgttaacttcaacctcttcataaccggtctgaccgtgcagcacatcttcatagtaacgctcaatgcccagcttaccgatatcatgcgttgccgcatagttggccagtttgccgtcattattcaggcgttcgacgtctttatcgttgattttgctcacatagccgatgacgtgggtcaacgcgctaccgtaaggatagtaacgacgtttatagcctttaacttcgacacccggaaaacggtactgattgacggcaaagcgagctacttgtacttcggtcaggttagttttcaccggaatagaggtgaaacggtgactacgtgcgcgctcttttcggaatgcagcaatatcgtcatcggtcagatctaccacgctgcgcaaagcgtccagcgtttgctgcacgttatcgactttctccggcatcatttctatctggtagatagtgcggttgagggccagagggataccgttacgatcgtagataatgccgcggctgggcgcgataggcaccagcttaatgcggttttcattagagcgggtctggtagtcggtaaagcgaacaatttgcagattatacaggttggcgataagcacgccggtcagcagcaaaatccccaaaaaggcgaccagcgcccggcgcacaaacagcgcggactctgccgtatagtcgcgaaaagagttctgtagtttcatccgctgcgttttctactcaaagctcccttatcactcacggtgataaggatggttggtggtgatgctccacgcccggtacagactctctgcgaccagcacgcgaaccagcggatgggggagggtaagcgcgctcaggctccagctctgctcagccgccgctttacaggcagggctcaacccttcaggcccgccaatcagtagactgacgtcgcgaccatccagcttccagcgttccagctcagcggctaactgcggcgtatcccagggcttgcctggaatatcgagggtgacaatgcggtttttgcctgcggccgccaacatctgctcaccctctttgtcgagtatgcgcttgatgtccgcattcttgccgcgttttccggccggaatttcaatcagctcgaagggcatatctttcggaaaacgacgcaggtactcggtaaaaccggtttgtacccagtccggcattttcgttcccacggcgacaagttgcagcttcacgcattaactccagagtttttccagttcatacaggcgacggctctcttcctgcatgacatggacaatcacatcgcccaaatccacgacaatccagtcggcgctgttttcaccttctacgccgagcggtaacaggcccgctgcgcgagactcctgcacaacgtggtcagcaatggacataacatgacggctggacgtacccgtacagatgatcatgcagtcggtgatgctggatttgccctgaacgtctaaggcgatgatgtcctgacctttgaggtcatcaattttgtcgataacaaaatcctggagtgctttaccctgcaagttttccccctgggtgaatcaaatagataaaaatggtctgtcagtatacctgaaccagaggcgatttcgggacaattgtcgccgaatcggctttcgaaagtgggctatcatcccaccccgcgccgcagattgcatcgccatttttgtaaaacaatttctacaaagtcgtgtctggcggaaaaagtctggctgcggagaatatcagcctgcccgggtctgtcaatggtcgttgcggcttacccgtaaaaaaacagaaaagtcatgcattctcgaccccgatggcacggctattgaggacgcgtagcgtcgcgaatttttggttgatatcaatggcgctccaacacccctggtcaacgcgaaaatgccacatagcttcggcaggcatgccaattaaacgggcgattaacagactcagtacaccctgatggctgacgactaaaatattctgatagtgctgaaattcactaagccttgcgataaagcgttccacacgttggctaaatgcctgaaatccttcaccgttcgtggggattgcatgctgccagtcattgcaccacgcgctatagttttcggcatcttcttgcatgaggtcgcgatgatgtcgcatctcccagtcgccaaaaaacatttcgttgagttcaggtatgatttgcacggggagctggcggtcactgagaaccagtcgcgcggtatgctgtgcccgttccagttcactgcataaaaccagatcaaaggaaacaccatgtagcagcgtatgcagattttgcgcttgctcaataccgcgcgcggtcaggggggtgggcgcatgaccgctgtaaagaccatcgatattcgcttgcgtttcaccatgacgaattaaccacagtcgcatcatgccctccgtaacgacaggtatcagcgatacaagccttgttggttaatgtaagtcagtaccggttccggcaataaatcctcacaactttcaccgttttgcaaacgttcgcggatgatggtcgcgctgatgttaaaccacggcgtttcagccagataaattttaccggcaggctgaaggtgaagatcttccgggttatgtgtcaaatgatcttccagccattgctggtattgcggttgcgccatttcaagtgggtaacctggacgccgacagacgatcaaatgtgcattgtcgagtatcgtttcgtattcgtaccaggtcggaaaggtcagcagactatcctgaccaataataaacgccagcggcacgtccggtccttgttcctgccgccactctttcagtgtttgcgcagtgtaagagggggcattgcgctttagctcgcgttcatcaagagtaaataatggcttgtcggcaatcgccagttcaagcatgtgtttacgctgcacgctgttcgcttccggctggggacgatgcggaggaacattattagggatgattgtgacccgcgtcagaccaatcaaattcgccagcgtttccacgggttttagatgaccatagtgcaccggatcaaaggtgccgccaaacagagcctgtaaagatttcatatcaaccgtcgataaatacgtccgccaggggtttatggcacaacagaagagataacccttccagctctgcccacacactctgaccgtaatcttgtttgagggtgagttccgttcgtgtcaggagttgcacggcctgacgtaactgcgtctgacttaagcgatttaacgcctcgcccatcatgccccggcggttctgccatacccgatgcttatcaaacaacgcacgcagtggcgtatgggcagactggcgtttcaggttaaccagtaacaacagttcacgttgtaatgtgcgcaacaaaataaccggttcgctgccttccagacgcagttgctgaagaatatgcaatgcgcgcttactttttcccatcaacaaagcatcaacccaatgaaaaggggtgaaatgcgcggcatcattcaccgcctgttcaacgcgcggtaatgtcaatttgccgtctggccagagcaggcttaaacgctccagtgcctgagccagcgccagcaggttaccttcataacagtagcagagcacctgatttgccgcgtcatccagttctaagttgagctgttttgcgcgcgcagcaacccagcggggaagctgagcctgctccggtgtctgacaggtcacctgcacgctgcgattcgcaagcgcagtaaaccaggcggcattttcttgcgctttgcttaatttattaccgcggacgatcaacagcaggtcgtcatgcagaagtccggtgagtgtgagaagttgctcattgatcgccgcattcggtccgttttctggtaacaacagcaatagcgtttgtcgactggcaaacagactcatagcctggcataagctaaagatcgcattccagtcagtgttgggatcaatggaaaaagtgtggtgttcttcgaatccttgtgccgcagctacctgacgaacagcgtcctggctttcctgcaataacagaggatcgttaccaagtaaaagatacgccgcgcgcagcccttcattgagctgcgcgcggagttgttccgggtacaaccgaatcatcagttacccagcgtggtggagacgcgtgcaggcgttgccggagtatccgttgtggtgctcgtctgttcttcgtcggaacgaatatccgcagcacggatgcttggcagcttacgaatcagctgttcggcagcacggtcgtacatctcttttacgatcatgtcttgttcgttatctttcgctaacgccatttgcgggttatcgaagaagctacggaagactttggcgctaatcgggtagatatcacggccggggatcaacacggtcgcattaaccgtcatgatcatctgatactctgctgtttgaccgttacggaatacgcttgcggtatctttcgcgatgctcactttacccaaacgcaaggatggaacgtccttacgcgtggtttctttatcaagcaactcgacaccattcagacgtaactggttacgcaccgcacggcttaatggcccgttcggatcgccactgtccaggatcatgaccttcatagtggaaggaacctgcgtggtatcacgcagatgccagccacacccggcggtgattaacaccgccagagataacaacaatgttgccagatatcgcacgcttcctcccgcgcttagccaacgaccagattgaggagtttacctggtacgtaaatcactttacgtacagtaacgccatcaagatattttgctaccagatgttcctggccagcacgttcgcgaacctgttcttccgttgcgtccaccggaacggtgattttggcacggactttaccgttaacctgcaccacgaccagcgtggagtcttccaccatcgctttttcgtcagcaaccggccacggcgcgttgtcgatatcgccttcgcctttcagttcctgccacagcgtgaagcagatgtgcggggtgaacgggttaagcatacggacaacggccagcagtgcttcctgcatcagagcgcgatcctgctcgccatcggttggtgctttcgccagtttgttcatcagctccataatcgccgcaattgcggtgttgaaggtctgacgacggccgatatcatcggtcactttagcgatcgttttatgcacatcgcgacgcagcgctttctgattttcagtcagcgcatcaacgttcagtgccgcaacatcaccttttgctgtgtgctcgtaaaccagtttccagacacgtttcaggaagcggttagccccttccacaccggattcctgccattcgagagtcatatcagccggagaagcaaacatcataaacagacgaacggtgtccgcgccgtaacgttcaaccatcacctgcgggtcgataccgttgttcttgctcttggacattttgctcatgccggtataaaccagttcatggcctgccgcatctttcgctttcacgatacggcctttctcgtcacgttcaacgatagcatcaaccggggaaacccagttacgttcgccgttttcgccaacatagtagaaggcatctgccagcaccataccctgacacagcaactgtttcgctggttcgtcagagttcaccatgcctgcatcacgcatcagtttgtggaagaagcggaagtagagcaggtgcataatggcgtgttcaataccaccaatgtagatatccaccggcagccagtagttagccgcttcggaatccagcataccttctttgtactgcgggcaagtgtagcgcgcatagtaccaggaggactccataaaggtgtcgaaagtgtcggtttcacgcagtgctggcataccgttaacggtagttttcgcccactccggatctgctttaatcgggctggtaatgccgtccattaccacatcttccggcaggatcaccggcagctggtcgtccggggtcggcattacggtaccgtcttccagcgtcaccatcggaatcggcgcgccccagtaacgctgacgggaaacaccccagtcgcgcaggcggtagttcactttacgctcgccaacgcccatcgcagtcagtttatcggcgatggcgttgaaggccgcttcatggtcaagaccgttgaactcgccagagttgaacagcacgcctttttcagtcagggcttgctgagaaagatctggctcagagccgtcagctgccaggataaccggtttgatgttcaggccgtatttagaggcaaactcgtagtcgcgctggtcgtgccccggtaccgccataactgcgcccgtgccgtactccatcaatacgaagtttgctgcccaaacgggaatttcttcgcccgttaatgggtgaaccgctttaaagccagtatcgacgccttttttctccatcgtcgccatttcagcttcggcaactttggtgttacggcattcgtcaataaaggccgccagttcaggattattttccgccgctttctgcgccagcggatgacccgcagctaccgccaggtaggtacaacccataaaggtgtccgggcgggtagtgtaaacggtcagcgtgttgtcatagtcgttaacgttgaaggtgatctccacgccttcggaacgaccgatccagttacgctgcatggttttaacggtgtctggccagtgatccagtttatccagatcgttgagcagctcgtcagcgtaagcagtgattttgataaaccactgcgggatctctttacgttcaactttggtatcgcagcgccagcagcagccgtcgataacttgttcgttcgccagtacggtctggtcgttcgggcaccagttgaccgcagaagtcttcttatataccaggccttttttatacagctcggtgaagaatttctgttcccaacggtagtattccggcgtacaggttgccagctcgcggctccagtcataaccaaagcccagcattttgagctggtttttcatatacgcgatgttgtcgtacgtccacggtgccggagcggtgttgtttttcaccgccgcgccttccgcaggcagaccaaacgcgtcccagccgatcggctgcaggacgtttttgcccagcatacgctggtagcgggcgatcacgtcaccgatggtgtagttacgtacgtggcccatgtgtagtcgaccagaaggatagggaagcatagacaggcagtaatacttctctttgctctcgtcttcggttacttcaaatgtgcgcttctcatcccaatgaagctgtactttggattctatctcttccgggcggtattgctcttgcatggcagccagtggtcctgttttcaatacggctacaaatgtagcgttgaggtggtttttcagatccgcatagcatagcccaaacgtccgcgtcaaaacagcctttcgcgcactcgacgttgaaatgatgcccggattattcatacattaatttacagagtttgtgggcgtattagcaaagcaaggaacaaagaacgtctattattatagtcagttaacgacccgggagatgaaacgatgaacaaggttgctcaatattaccgtgaactggttgcgagtctgagcgaacgcctgcgcaatggcgaacgtgatatcgacgcactggtggaacaggcgcgcgagcgcgtaataaaaacaggggagttaacgcgaaccgaggtcgatgagctgacgcgagctgtcagacgtgacctggaagagttcgccatgagctatgaagagagcctgaaagaagaatctgacagcgtctttatgcgggtgattaaagaaagcttgtggcaggagctggcagacatcaccgataaaacgcagcttgaatggcgcgaagttttccaggacctcaatcatcatggggtttatcacagcggagaagtggtcgggctgggaaatctggtctgcgagaaatgtcacttccatctcccgatctacacaccggaagtgctgacgctatgcccgaaatgtggtcatgaccagttccagagacgcccgtttgagccgtaatagtctgatttcgcacagcaataaagagaatatgggccgaatgaaattccccggcccttgtttttatctttacagtaaatcttcagtctcacgaatttcctgactgacatctctggttccggaactctgaactttacgatacaggtcgagagcctgtcggagatcgacaggtcttccttctccgtagtgatacataatggccaggttataccaggcagtggcgtcattgcattcagcggctttcgtaaaccattcaaaggcagcctgataatctttctcaacgccttgtccgtgtttatacatataaccgatgttgacgtaagcgccgacgctcccctgagcggcagccttcagataccagtacatcgcttgcttatagtcctggtccaccccttcgccagcgttataatcccatgcaatttgaaactgggcgtgccgattaccctgctgtgcgcttttcaaataccagaatgcggcgagtgtcttgttttgagcaacgccttttccgtcttcataaagatcggccagattgttttgcgcgtcactatggccttgtaatgcagcttgtttgtaccagaaaaatgccagcgcatagtcttttgcgactccgttgccatttctgtacatccacccaagattattttgcgcataagacattccgctctccgcggctatctgataccagacaaccgcttctttataattgggggcttctccacgatccagtgtccagccaagggcgttggaagcgaaagtatggccttgtagggcagcttttttcagccagaagatggcttgctcattatctttatgacggcttttatcctcggtatacttttgccctaaggaatactgtgcttcacaatgaccttgctcagcggccagcttcagccagtaaaaggctttttcgtcgtccggagaatcaattgcgctatcgcgattataataaaacccaacaatatattgagcctcgcaatcgcctttttcagcacgttcgataatctcatctatacttaaattatcgcagcaactactcgtgaaaatcattatcatttccttatggttgcagataaaacatattatatttttatgtgttccatttttgcgtaagccttattttatgcgtattatgtcgcgtcagaaaagtataaataaacgagcctcgcaatgcggctaatattcatttaatgaatatttaaggataaattatatggacatggagagccaaaaaatattgtttgcactttccactccgatggaaatacgcaatgaatgctgtttacctagccatagtagtcccaaaatgtatttaggtacatgcttttttgacctttcttccagttggggaattgatgaccgtgatgacctgctgcgcacaattcaccgaatgatcgataacggtcatgccgctcggttggcagggttttatcaccgctggtttcgttatagcccatgtgaatggcgtgactatcttgctgaactaaatgagcaaggtcaggcttatgcgcaatttgtcgccagcaccgccgaatgctgtggcgaagggggaatcaaagcctgggattatgtccggatgggttttttaagccgaatgggcgtacttaataactggttgagcgaagaagaaagtctatggatccagagccgcattcatctacgggctctacgttattatagtaactggcggcaatactttgccggttatacctttggtcggcaatattggcagtctcccgaagatgatcatctgcctttattacgcgaattcttagcgcgtaaagaatacgacgattccggcaatgatatgttttatcaattatttgccagtgatgatgcgtattaccctaccttgtcctggcaaccattggcttactattctgcatgcccggaaacgcttaaggatatgagcgacctatgaaaaattgctggaagatcctcgatatagaggaaacgactgacgtcgatattatccgccgcgcttatctggcgctgttaccgtcctttcatccagaaaccgatccgcagggttttaaacaacttcgtcaggcgtatgaggaggcgctacggattgcgcagagccctgctaaatctgtttggcaaccagaagaatatgaggtagcagaacatgaaattctgctcgcctttcgtgcgttacttgcctctgatagtgaacgttttctgccctccgcctggcagcgattcattcagcaattaaattattgcagcatggaggagattgatgaattacgctggagcctgtgcacaatcgccatgaacactgcccatttatccttcgagtgcgtggtgttattagcagaaagattgcggtggttacaggaggaaaataccggggaaatagacgaagaagaactggaatcctttttatatgccattgcgaaggggaatgtttttaacttccagaccattctgcatctgcccgttgccgtgcaaaatgacaccatcgatttttaccaaatgttcgctcggatttggagtagccatccacaatggctgacattgtatttagcgcaacatcgcgcagtgattatccccgatgatgcaaaactgcacagaaatttactccgctggtatagcgcaggtcgcctggatatccccgaacttctggattacgcccagagttggcgggaaactgaacctgataatgaagatgcgccttattatgaatacgcgcaacgcgtctattgtggagaaggcgaaagcctgttggcagaactttgtgactactggcgcgagtatccctccacccaggcggatgctttaatgttgcaatggtgccgtcagcatcgggtcgattattacccattactggtgatgatgattgaagcgcgtgatctggttaacgatcagggaaaaccgctactttatgtccccggcgacagcgcccgtacgcgttttcatttatacgaaatactcagcgatgaaaaactctctgcgctggggcgtagtctggtcgagatggttttgcacaaaggacgtaagccgcggatcagtctcacgcgtgatacagaacataccttatggccattatatctagttgccaaacaattagtgcaggcctgccaacctacagaagaaagtttaatgccgattgtgagccgccttgatgcagaaaatcgttgtccactggaagcattaattattcgtcgattattaattcaggcggcgaattttaccgagaagcaaactgttgaaccggagccgcaaccgcagccaatgcccgttgacgatggtgggccaggctgtctgggcatcattaaaattattttctatatttttatctttgctggtttgatagggaaaatactccatctgttcgggtgacagtcgacgttaatgtgcgggaagcccggcaagtaatctttccgcatttttgtaatgttgtttggcggtcagttttaaccatttttgagattcataatggttaacattaataccactgccatttctgtagatcaaacctaaagtatattgagcatgagcatacccttgttcagctgcttccttataccagagaattgctttacgggtgtcgggtttgacccccagacctttgaggtagatccaccccagtttactttgcgcgcgtggattttcctgttccgcactttgctcataccagtatctcgcctgtgtataatccagtggtttaccgtcgctaccatgaagataaaattctccaaggcgatattggctcgtactgtgaccatgaatcgcggaaagctccgtggctgccgtggtgaatggaagactgcccggactgcttaaataatcaaaggcataattcaccatggctttatcacgcaacgtcgttttcttgggttggctaatacaggtaattgctgcaactataaaaattgcgaatatatacattaattttttattcatgtgtgaatgcttcgattttctttttattttgaaagcgtcaagtttatactcatcaataataaaaaagtagtcagttaatgcacttaagggattattaacaaatgaataaggaagaacaatatcttctttttgcgctttctgcgcccatggaaatacttaatcagggttgcaaacccgcgcatgacagcccaaaaatgtatactgggataaaagaattcgagctcagtagttcctggggaataaataatcgtgatgatttaattcagactatttatcagatgactgatgatggtcatgccaatgatttagctggcttatatctgacatggcatcgctcttcccctgaagagtggaaagcattaattgctggtggcagcgagagagggttgatttatacccaattcgttgcccaaaccgctatgtgctgtggggaagggggaatcaaagcctgggattatgttcgaatggggtttctgagtcgggtcggtgtgctcaacaagtggctgacggaagaagagagtttatggctgcaaagccgcgtctatgtacgagctcaccattactatcacagctggatgcactatttttccgcctatagcttaggacgtctctactggcaatcttctcagtgcgaagacaacactagcctacgcgaggcgctaaccctgtacaaatacgatagcgccgggagtcgtatgttcgaagagctggcagcgggaagcgatcgtttctatgccacgcttccctggcagccattaactgtccagtctgaatgcccggtaacgcttaaggatgtgagcgacctatgaaaacatgttggcaaatcctcgaaattgaaagcacgacgcaaatagacattatccgccaggcttatcttgctcgcttaccgttgtgtcatcccgaaaccgatccgcaagggtttaaagcattacgccaggcctatgaagaggccctgcgactggcggtaaatcctgtcgaggaagcagatgatgaagaaaaagatgctgccgctgaacatgaaatactacgtgcattcaggacattactggatagtgaaagtgatcgttttcagccttccgcctggcagaaatttattcagcaattaaatacctggaacatggaggatgtcgatcaattacgctggccgctgtgtgcaatcgccatagaagcgcgatatcttagtttaaattgtgcttctttgctggcagagcgtttgaactggcatagttttaatgacagcgaaggaatggatgaggaagaaagggaggcttttcttgaggccattcaggctggtgattgtttcgatttccttagccttctggaatatcccattgcgttgcagaaccagactgttgagtattacttcgcgctggaacgttgctgccgttaccatcctgactatgtcactgcgtttttggcgatggaaggtccgtggttaattcctgatgatgcaaagttacatcgcaaactgttgcgctggtacagcagcgtgcaaacaggtatggcggaactcattcctgtcgctcaacagtggcaaacggaagaaccagaaagcgaagatgcccggtattacttgtgtgcacaacgtttgtactgcggcgagggggaaagcctgcttgccgatctctgcgcgtactgggaaagttacccatctacacaagctgataatttgttgttgcagtggagcaagcgtcattgcccggattatttcgcgttattagtgatggttatcgaagcgcggagcatggtagatgcgcaaggtcaaccgctgaaatatgttcctggtgagagcgcccggacgcggctgttatgggcggagattttacatagcggaaaattaagcccgttaggtcaaagctttattgagagcttattcttcaagcgcaaagcatgggcgtggtggaaaagcagagtcggtagcgagacagagcaagatagtccgttcctggatttgtatcgggtagcggaacaggtagtacttgaagcgtttccgaaacaagagatgctggcccgtcttaatacaaggctggaaggcggagatgctcatccattagaggccattgtcacccggatgcttttgacgaaagtgaaactcgagccggaggatgaagatgtcgatgagccaacacctgaaaatcatgaagaaaaaaatgatgagggtgaaaaaccacagagcattaccagcattatcaaaatcagtttaacggtgctggtgataggttatgctctcggcaaaatcgcgatgttgtttagctgacgatgtgttttttgcgccgatgccggatgcagcgtttacgccgcatccggcagccgtgtttatgggatctcaatggctaaataatcgctcgcccgccgccgaacttcatccacgcgggccatatcgttactctgcaacgccgcatcaaaatcggtgatcacccggccgatctcttctcgctcgtcacccagcgcccgcgcccacaactcttccagtttggctttaaaggtgcgattgatgagcatatcgcgcggataaattttcaatgcggataaccgcgtccgactctcttcaatctgctgcgcgctcaatgttaccgggctgtggttaatcactctggacttaacgctgccgtcttccagaagcacgtcaacttcaagcaacccgttgatatcataactaaagcgaatatcaatgctctgataagccccggttttcttcaacggcacatcgaaggattccaccagaatgttgtttttaactttgtggttttctccctgatagacgttaaccgtaatactatcctgttccgggtgcatggtactataagtttctacacggctcacgggcacagtggtgtttcgttcaataatcgggctgaaaatgccggaaacgccctggcggttaacttcaacgcccaagctgtaagggcaaatatcagtgaggattacctcttcaatatcttcactgcgtaagcggcaggcggcctggattgctgcgcccagcgcgacaatggtgctcggatcgtaactttgatacggtaatttgccaaacagacgcacggcgattcgctgcaccagcggcatttgactcgcgccgccaaccagcaccagactgtcgatttgactcggcttcagacgcgcatcgcgcaacgcctgttcaatcggcactcgcaagcgattgagcagcggcaaccacaaatcttccagttcgttctcgtaaaattcgcattcccgcgtttcttcctgatactgccagcgaatgtgcaatgggctttgattgctacattttgccgcttccacacaggcgtacaaggctgccagttcactctcgttaagcgtggtcctggcgacatccgcgcgttttaaaacctcatcgaccagcatatgggtaaaatcttcgccaccaagaaagttgtcgccagcggaggcgtgaacttcaatcaccggcgtggcgtactcaagcaccgtaacgtcaaacgtgccgccaccgagatcaaacaccaggctacgggtattttgttgggtatgcaggccatacgccatcgcagctgctgtgggttcattaattaagcgtaccgcatttaacccggctaactccgctgctaaacgggtatgcttgcgttgttcatcgctgaaataagccggaacggagatcaccacatctttaatcggacgttgcagaaattcttcggcatcttcttttaaactgcgtaataccaaagaggacagttctggcgcgttaaatgtgtcgctgcctaaccgccagttggtattactgcccattgcacgtttaaataacgctgccgttttatccggatggctagtacgccgacttacagccggttttccgactaaaatatgattattttcatccatgctaattatggatggtgttaaatattcaccgaacttatttggaattaattgcgcggcaccgtctttccagacggcaattaaactattggtagtaccgagatcgataccaatggcgagttctgcattatccattgcatttatatcttgaaagaaaaagagataaacagattaagaccacccaggtaacgcgtggtgatcttaatcaatgacgtgtgttaagcgtaaaatttcagacgatcagccagtaaatcaacaaagccctgacgatcaacatcgaccattacggtggcattcggtttattgcctgtcagataataataatcaacaaccgtcataccctgggtatatttcccctgtgtttccacgccaacccagcgctcaacagaggtaaataactccggtttcaacagccaggcgatggtgcatgggtcatgcagtggtgcgccgacaaagccccatttttcgtctttatgatattcgaggaagaaatccagcagttcggcaacaatggtactaacagggttaccaatcgcgcggaaacgctcggtgtcttcaacgtggatttgtgctttatgagtaacatccagaccggccatcaccaccgggatcccactctggaagacaatttctgccgcttccgggtcaacgtaaatattaaattcagccgcaggcgtccagttacccagccccatagcgccacccataatcacgatacgggcaattttgctatgcagttccggatggctattgagcagcaaggcaacgttagtttgcggtccggtagacacaatggtgacaggttccgcactttcacgcagcgttttcgccatcagctctaccgccgtacagttttgcggtgcgaatgtcggttccggtaatgccgggccgtcgagaccgctttcgccgtgcacattgtccgcgataatcaactcacgcattaacggttttaccgcgccgcctgctaccggaatatcggtgcgattaagcaaggtcagcatacgcagaacattgcgtaaggttttttctggtgtctggtttccggcggaagacgtaattgctttgacatcaagctctggactggcgagggcgagaactattgcgatagcgtcgtcatgacctgggtcgcaatctaacagaattggcagtgccattgttgctccttgttgtgtgcttctttgcgacaagggtaacgccaggatgtaacagatacgaggggcgaaacgataaagcgtgagatggcgcgcaattgggtatgcgcgccagagtgattaatgcaggattttcgcgaggaagtcttttgcgcggtcgcttttcggatcatcgaagaaagcgtctttcgggctgtcttcgacaattttaccctcgtccataaagatcacccgattcgccactttacgggcaaagcccatttcgtgggtcaccaccatcatggtcattccttcgttcgccagttccaccatcacgtccagtacttcgttgatcatctccggatccagcgcgcttgtcggttcgtcaaacagcatcgcaataggatccatacacaacgcgcgagcgattgccacacgctgctgctgaccgccggaaagctgcgccggaaacttattggcgtgagcagaaagcccgacacgctccagcagtttcagggctttttcacgagccggcgctttatcgcgtttaagcactttcacctgcgccagggtcaggttttcgataatgctcagatgagggaacagctcgaaatgctggaataccatcccgacgcgggaacgcagctttgccagatcggttttcttgtcgttaaccacgataccatcgacggtgatttcaccttgctgcaccggttcgaggccgttgacggttttaatcagcgtacttttgccggaaccagacgggccgcaaaccaccaccacttcgccttttttcacttcggtactgcagtcggtcagcacctgaaagtgaccataccatttactaacatttttcagggtaatcattatgctgtccttcttttcaagtagctgaccaacaagctcgcgctaagactaataacgaaataaacaaatccggcaaacaggatcatctcaacctgcgtaccatcacgctcaccaatggtactggcggtacggaagaaatcggccagggataacacatacaccagactggtatcctggaacagtacgatgccctgagtgagcagcagcggcaccatcgcgcggaacgcctgcggcagaataatcagtttcatgctctgccagtgagtcattcccaacgccagcgcggcgctgctttgaccacgagaaatactttgaataccagcacggataatctcactatagtaggccgcttcaaacatgctaaacgccaccatcgcgctaattaaacggatatcattttttgggcttaatcccagcacgttttgcagaaaacccggcacgatcaggtaaaaccacagcaaaaccataactaaaggaatgctgcggaatacgttaacgtaggctttggcaaaccacgccacgggcgcaaagctggataaacgcatcaccgccagcatcgtgccccacaaaataccaatcactaccgccgtgacggtgattttcagggtgatcaccagcccgtcgagcagatatggcagggaagggacaatggaactccagtcaaactcgtacattatttgccccccatgttgccaggcaggcgaactttacgttcaaccagcgtcatcaccagcatgataaaagcgttaatcaacacatacgccagcgtaatggcggtaaagctctcccaggcatgggcactgtaatcgagcaatttacccgcctgcgccgccatatccaccagaccgatagtgctggcgatggcggagtttttcaccaggttcatcatctcactggtcatcggcgggacgataacgcgataagcattaggcagcagtacgtatcgataagcctgcggtagcgtcaggcccatcgccagcgcggcatttttttgccctcgcggcaggctctgaatcgcggcgcgtacctgttcgcaaacacgggcggcggtaaacagccccaggcagagcatggaactaaggaaaaactgaatattgggatccagctcggccttaaaccacatgccgattttctccggcagcagctccgggatcaccagataccaggtaaagaattgcacaatcaacggcacgttgcggaacagttcgacatacaacgtacccagaccagagagaaaacggtttggaacggtacgtaaaatgccgaaaaaactaccgacgaggaaagcgataatccaggcgcagatgctcaaagcgatcgtcacctgaaaaccactccagatccaaccaagataggtggtgttgccgaacggggcttgttgtaaaaaaataccccagttccagtctatagacataaatctactccagaaaaaagagggtagcagcgttaactgctaccctcgaagattgttacccagcgtattgcggttttcaggcccgatggggaacgaccatcaggcgtatagtctgtccgtgctacgtaacaatcgagagggctggaatttccgcccctggttcttgtaattagttcagtgccttgtcattcggttctttgaacagtgctttcatttcgtcactcagttcgaaattcatgttcaggtttttcggcggaattggatttttgaaccacttatcaaaccatttttccgcttcaccggaggtctgcacctgagcgatggtgtcatccatcagctttttgaactgcggatcatctttacgcaacatacaaccgtaggcctcctgagactgcggcttgccgacgatttcccagttgtctggtttcttcgctttcgcacgttcaccggccagcagagcgtcatccatcataaaggcaacggcacgaccgctttccagggtgcggaaagagtcaccgtgatctttggcgctgatgatgcgcatattcattttttgctcttcattcagtttgttgagcaaaacttcagaggtagtgccggaagtgacgactacggctttgtctttcaggttggcaaaatctttgatatcgccaccctttttggtcaacaggcgcgtaccgaccacgaaaatagtgtcagagaaagccgcctgtttttggcgttcgacgttgttggtggtagaaccacattcaaaatcgaaagtgccgttttgcagcagtggaatacggttttgactggtaatcggaatcagttttacctgcaagtccggtttgttgagtttctttttcactgcttcaacaatggcgttggagtaatcctggctgtaacccaccactttttgctgattgtcgtaataagagaaaggcacactagattcacggtgaccgacgacaatcacaccgtttttggcgattttgtccagagtactgcccgctgccggggcggcgtcatctgcctgtgccagtcctgcggaaagcgccagggcgaggattgctgtggcaggtttacgtaattgcatatccaactcctttatcttctgcgttaagaacgcatggatacccgttgtgagtgtttgtgttgttatcgtctgcaactttattgtgcagtgttgtgcctgttagggaaggtgccttaggtaacatttagtttggctaaatgtaaagatattgctgttttattgtttgtttttgcgagatgcgccgcaccattccgaagcaaaattcttaaaatgcactcttttagtgctaccgctggattactgtggtgcaactaggttgtactgatgctgtttcagggtttgccttgtataacaaagcaatagatgtgccaaagttggataggagaatattgttatccggataatgcactgatgccgcatccggtgagcgtgccgaaatatgggatgtattccggcacgataagaagggattatttacgtcgctgacgcagactcatcaacacagcagcaaaaccaaacaatgccgtcagcacccacagcggccagttgccggtacgtgcgtatggtgtgagtccggtggtcggcgtcacgttagtggttaacacctcgcgggtgaactgcgggatcatcgcctgaatctcaccctgcgggccaatcaccgccgtaatgccgttgttggtgctgcgcaacagtgggcgcgccagctccagcgcacgcattcgcgccatctggaagtgttgccatggaccaatagatttaccaaaccacgcatcgttggagatagtcagcagatagtcggtatccgggcggaagttatcgcgcacttgctcgccgagaatgatctcgtagcaaatagccgcagtaagctcaataccatttgcgctcagcggcggctggatatatggcccacggctgaagctgctcatcggcagatcaaagaacggtgctaacggacgcagaatgctctccagcgggacaaactcgccaaacggcaccagatggtttttgttatagcgatcggcactttcgtagctgtacggcgcacctttacccagcgtgatgatggtgttgtaggtatcgtagcggttctgcttattgagacgcgcgtcgacaatcccggttaccaggctgctacctttatcacgcaactcaccgtccagtgctttgaggaacggttgctgattaatttccagatcggttatcgcgctctccggccagataatcaagctacttttgcccatcagcggtgccgttgcgttgtagtaaatcttcagcgtattaagaagctggccttcgtcccatttcaggctttgcggaatatcgccctgaaccatgctaacctgaatggttttctccggttgtggggtaaaccactggatgtaacgcagcgggaagggaagggcaaacagcacgacggccaccaccagcggacgccagttgcgtttgaccaacgccagtgccagcaggccactaaccatcatcagcaggaagttaatggcttccacgcccattatcggtgccagcccttttaacgggccatcaatctggctatagccgaactgtaaccacgggaagccggtcagtacccaaccgcgcagaaactcggtcacttgccagagggcaggggcggcaatcgctacgcgcagccaggtggttttcggccacagacggctcagcacgccagcaaacagtccggtatacaggctcaaatacgccgccagcagcaccaccaggaagatgttaaccgggccaggcattccgccaaaggtcgcgatgctgacatagacccagttaataccgctgccaaagaggccaaatccccagcaaaagccaatagcggcagactggagtggacggcggttaaaggtcaacgcctgaagccccatcaggctaataatcgccgcaggccagacgtcgtaaggagagaaggccagcgttccgcaggcaccgaataataacgccagcagcaggcgaatgcgctggcgttcaattaaactggcaaaagccatgtagttatctatccagtttcggttttattcatccagcttcggctggggactgtcatccgggattttgacatgaacctgaataatacgccgactgtcggccatcgccactttgaactggtaaccgtcgatgtcgatagtttcgccacgcgccggaagatgcccaaatgcctgcatcaccagaccaccgatagtgtcgacttcttcatcgctaaagtgggtgccgaacgcttcgttgaagtcttcaatggaagccagtgcgcgtacggtccaggtatgacgactcagctgacggaagtcgatatcatcttcttcgtcatactcgtcttcaatctcaccaacaatcagttccaggatgtcttcaatggtcaccagaccggaaaccccaccgaattcgtcaataacgatcgccatgtggtaacgctgagagcgaaactctttcagcatccggtctacgcgcttactttcaggaacgacaaccgcctgacgtaacactttgtccatgctgaaggcttcagcatcgctgcgcataaacggcagcaagtctttcgccatcagaatcccttcaatgtgatctttgtcttcgctaatcaccgggaaacgactgtgggcggactcgatgatgacatcaagacattcgtccagcgtctggttgcgtttcagggtaatcatctgggagcgggggatcatgatgtcgcgaacgcgttggtctgcgatgtccatcaccccttcgagcatatcgcgcgtatcttcgtcgataaggtcgttctgcccggaatcacggatcagcgccagcagttcgtcacggtttttcggttcaccgtggaaaagttggctgagtaacagggagaaaaatcccttcttgttgcttatcgtgtcactactgtgactattgtcgtcgctcatggcgtcgtatgggttctcatgttagttaatcaaaacgccgtcgttaatcaccaacggcggggacgtctgccagtcaaatgcctggcaaattattctttctcggcaatgtacggatcctcatagcccagagcaagcataatctctgtttcgagggcttccatttcttctgcttcgtcatcttcgatgtgatcgtaacctaacaaatgcagactgccgtgcaccaccatatgcgcccagtgcgcctccagtggtttgccttgctcctgagcttccttctcaaccacctgacggcagataaccagatcgcccagtaggctcatttccatgccaggcggcacttcaaacgggaaggagagcacgttggtcggcttatccttaccgcgataggtcagattcagactgtggctttcggcggtatcgaccacgcgaatcgtcacttcgctttcttcctgaaactgcgggatcaccgcattcagccatgtctgaaactggctctcttccggtaacccggaattatcttcacatgccagttgtaaatcgaggatcacctgactcatttttgttcctgttcttcgcgcttgcgttctgctgccagcgccgcttttcgtttttgttcggcttcttcccaggcttcataggcgttaacgatacgcgccaccacagggtgacgaaccacgtcttcgctgtggaagaagttaaagctgatctcttcgacatcggccagcacttcgatggcgtgacgtaagccacttttagtattacgcggcaggtcgatctgtgtgacgtcgccggtgataaccgctttactgttaaaaccgatacgggtcaggaacatcttcatctgttcgatggtggtgttctggctctcatcgagaatgataaacgcgtcgttcagcgtacgaccacgcatataggccagcggtgcgacttcaataacgttgcgctcaatcagtttctcgactttctcaaagcccagcatttcaaacagcgcgtcgtacagcgggcgcagatacgggtctactttctggcttaaatcgccaggcaggaagcccagtttctcaccggcttctactgccggacgagtcagcagaatacggcgaatttcctgacgctccagggcatcaactgccgcagccactgccaggtaggttttacccgtacccgccgggccaacgccgaaggtaatgtcatggtcgagaatattggcgatgtactgcgcctggtttggcgtgcgcggcttaattacgccgcgtttggttttgatattgaccgctttgccgtactccggcacgctctccgcgctttgctccagtacccgcgcttctttaatcgcaaggtggatctgttccggttcgatatcctgaatctgaccgcgcatcggggcagtatcgacatacaggctacgcagaatgtctgccgcagcggtgacgcaaatcggacggccggtcagtttaaagtggttatcgcggcgattgatctcgatgccgagacggcgttcgagctgcttgatgttgtcatcaaacgggccgcacaggctcaacagacgcgcattgtctgctggctccagggtgatttcgcgagtgtctatgttcaaaccgttcctcttatctgtatgccgccggaagctgaacattcaccggcctataaggaaattattcacgccacaggaaaaaggcgcaagcattgcaataaagatggggataaagagagaaaaaacaaggcccaccggaacggcaggcctgagaattacggctgataataacccacgccaaggtcgttttctttgcgggtacgggcaatcacactttccggtgtttctgccacgcgcagacccatttcatcttcagtacgcaccactttaccgcgcagagagttcgggtagacgtcggtaatttctacatcgacgaatttaccgatcatatccggcgtgccttcgaagttgaccacgcggttattttccgtacgcccggaaagctccatgatgctcttacggcttgtaccttctaccagaatacgctgggtggtgccgagcatccggcggctccacgccatcgcttgctgattaatgcgctcttgcagaatatacagacgctgcttcttctcttcttccggaacatcatcaaccatatcggcggctggtgtacccggacgtgcagagaagataaagctgtagctcatgtcgaaattgacgtcggcaatcagcttcatcgttttctcgaagtcttcggtggtttcgccagggaagccaacgatgaaatcagaactgatctgaatatctggacgcgccgcacgcagtttacggatgatcgctttgtactccagcgccgtatgggtacggcccatcaggttcagaatgcgatcggaaccgctctgtaccggcagatgcaggaagctcaccagctccggcgtgtcgcgatacacttcgatgatatcgtcggtgaattcgatcggatggctggtggtaaagcgaatacgatcgatcccgtcgatcgcagcaaccagacgcagcagatcggcaaagcttccggtggtgccgtcgtagttttcaccacgccaggcgttcacgttctgaccgagcaggttgacttcacgcacgccctgagccgcaagctgggcaatctcaaacagaatatcgtcggacggacggcttacctcttcaccacgggtgtaaggcaccacgcagtaggtgcaatatttattgcagccttccatgatggagacaaacgcggtcggcccttcggcgcgcggttccggtagacggtcaaacttctcgatttccgggaagctgatatctacaaccgggctgcggtcgccacgcacggagttgatcatctccggcagacggtgcagcgtttgcggcccaaaaataatatcgacatagtgggcgcgctggcgaatgtgctcgccttcttggcttgccacgcagccaccgacgccgataatcaggtctggattcttctcttttaacagtttccagcgacccaactgatggaagactttttcctgagccttctcgcggatactgcaggtgttcagcagcagcacatccgcttcttccgccacgtcggtcagttgatagccgtgggtggcatccagcagatcggccatcttgctactatcgtactcgttcatctgacagccccaggttttaatatggagttttttggtcatcgacttgctcttgcgaaatagtagccaggaatgcagggcgcatagtgtaatgctttgctgccgttgtgaccagtatgagcgttatcagcccttaggggtaaaaatcctgtaaacttaaagcatattgctaacaggatgattgaccatgacaaatcaaccaacggaaattgccattgtcggcggaggaatggtcggcggcgcactggcgctggggctggcacagcacggatttgcggtaacggtgatcgagcacgcagaaccagcgccgtttgtcgctgatagccaaccggacgtgcggatcagcgcgatcagcgcggctagcgtaagtttgcttaaagggttaggggtctgggatgcagtacaggctatgcgttgccatccttaccgcagactggaaacgtgggagtgggaaacggcgcatgtggtgtttgacgccgctgaacttaagctaccgctgcttggctatatggtggaaaacactgtcctgcaacaggcgttgtggcaggcgctggaagcgcatccgaaagtaacgttacgtgtgccaggcagcctgattgcgctgcatcgccatgatgatcttcaggagctggagctgaaaggcggtgaagtgattcgcgcgaagctggtgattggtgccgacggcgcaaatagccaggtgcggcagatggcgggaattggcgttcatgcatggcagtatgcgcagagctgcatgttgattagcgtccagtgcgagaacgatcccggcgacagcacctggcagcaatttactccggacggaccgcgtgcgtttctgccgttgtttgataactgggcaagcctggtgtggtatgactctccggcgcgtattcgccagttgcagaatatgaatatggcacagctccaggcggaaatcgcgaagcatttcccgagccgtctgggttacgttacaccgcttgccgctggtgcgtttccgctgacgcgtcgccatgcgttgcagtacgtgcagccagggcttgcgctggtgggcgatgccgcgcataccatccatccgctggcggggcagggagtgaatcttggttatcgtgatgtcgatgccctgattgatgttctggtcaacgcccgcagctacggcgaagcgtgggccagttatcctgtcctcaagcgttaccagatgcggcgcatggcggataacttcattatgcaaagcggtatggatctgttttatgccggattcagcaataatctgccaccactgcgttttatgcgtaatctcgggttaatggcggcggagcgtgctggcgtgttgaaacgtcaggcgctgaaatatgcgttagggttgtaaccttacaacattgccggatgcgtgccaaccgtaggtcggataagacgcggcagcgtcgcatccgacattgaaggataagacgtgtcaacatcgcattcgacattgaatgaacgcagaaaagcaaaaagctcgccgaagcgagcttttttaatgtggctggggtacgaggattcgaacctcggaatgccggaatcagaatccggtgccttaccgcttggcgataccccaactgggtgcacttacaaggtaagcgtcttgaataaattggctggggtacgaggattcgaacctcggaatgccggaatcagaatccggtgccttaccgcttggcgataccccaacaaattggttttgaatttgccgaacatattcgatacattcagaatttggtggctacgacgggattcgaacctgtgaccccatcattatgagtgatgtgctctaaccaactgagctacgtagccagattgtttcttcgatggctggggtacctggattcgaaccagggaatgccggtatcaaaaaccggtgccttaccgcttggcgataccccaataaccgggcggtgaaccgcttactcgaagaagatggctggggtacctggattcgaaccagggaatgccggtatcaaaaaccggtgccttaccgcttggcgataccccatccgtacaacgctttctggtgaatggtgcgggaggcgagacttgaactcgcacaccttgcggcgccagaacctaaatctggtgcgtctaccaatttcgccactcccgcaaaaaaagatggtggctacgacgggattcgaacctgtgaccccatcattatgagtgatgtgctctaaccaactgagctacgtagccatcttttttttcgcgataccttatcggcgttgcggggcgcattatgcgtatagagccttgcagcgtcaacctctttttcaaggaaaattgctcgaaagtgactgtttggttaggttgcgaacagcgtggcgctatattcgtcaattattgtttactttgtgttttttcccaccctacagccattcttttgtcatacaggatgaaattcggaatttaacaatagtggtgggaaattaatctatgaaatactggcctacagtgatgagttgtcaaacagtgatgtggcaaacccggaacatttccttactgcatatcagaatcaacaagcacctcaataactgaaacagccccggatttcaccggggctgtttcgcatttcttacttatacgcgctctggtgaacaccaaccgcgcgaccagacggatcgtccattttcttgaacgcttcatcccattcgatcgctttagcggaagaacaagcgacggaaggaccgcccggcacgcactcagcggcgctcggaagcgggaatagttcttcaaagatctcccgatacaagtacgcttctttagaggttggcgtgttgtacgggaagcggaagcgggcagtttccagttgctgatcagaaacctgctgcgcagccacttctttcagggtgtcgatccaactgtaaccgacgccatcggagaactgctctttctgccgccaggccacgcttgcaggcagatacgcttcaaaacattcacgcaggatgtgtttttccattttgccgttaccgcacattttatcctgtgggttaatacgcatcgccacatcaaggaattttttgtcgaggaacggaacgcgtgcttccacgccccaggcactcatcgctttgttggcacgcgcgcagtcatacatatgcagggccagcagtttacgcaccgtctcttcatgcagttctttggcattcggtgctttgtggaagtaaagataaccgccgaacacttcatcagaaccttcaccggacagcaccattttaatgcccatcgccttgatcttacggctcattaaatacatcggtgtactagcgcgaatagtggtcacatcataagtttcgatgtggtaaatcacgtcgcggatggcatccagaccttcctgtacagtgaagtgaatttcgtgatgcaccgtgcccagatggtttgccacttcctgggctgctttcagatccggactacccggcagacctacagcaaaggagtgtaactgcggccaccaggcttcagagcgttcctgatcttccacgcgacgggctgcgtatttcttggtgatagcggaaataatactggaatccagaccaccagaaagcagcacaccgtaaggcacatcagacatcagatggcttttaacactatcttccagtgcctgacgcagctcgtttttgtcggtcacgttatctttcaccgcatcgtagtcgaaccagtcgcgatgatagtaagaacggatttcgccgtcctggctccacaaatagctccccgccgggaactctttaatcgtgcggcaaactggcaccagcgctttcatttcactggccacatacagctgaccgtgttcgtcataccccatatacagtgggatgatccccagatggtcgcgaccaatcaggtaggcatctttttcgctgtcgtacagtgcaaaggcaaacatgccctgcaagtcgtcgagaaattccggccctttttcctgatacagcgcgaggatcacttcacagtcagacccggtctggaactggtaacgatcgccatattcggcgcgcaatgcctggtggttgtagatttcaccgtttaccgccagtacgtgggttttttgttggttgtagagaggttgcgcccccgcgttaacgtcaacaatactcagacgttcgtgggcgagaatggcgttatcgctggcataaataccggaccagtccgggccacgatgacgcatcaggcgactcagctcgagggctttcttacgcagctcaactgcgtctgttttgatatcgaatacgccaaaaatactacacataaccttctccgttaacctggtatttgttgcttgttgtgtttgcttgtttaaaaaaatgccgcaaagcagcactgtgcgcaagcgatttggcggtgaaaaaataaaaaacgtaatggtgattgtcgattggtgaaaaaaggtctggtgtgaggatatatttattgatgaatcgataatttttagcgggttttattgaatgtttatattttacgggggccaaattgctgacaaagtgcgatttgttcatgccggatgcggcgtgaacgccttatccggcctacaaaagcatgaaaattcaatatattgcaggagctgcgtaggcctgataagcgtagcgcatcaggcagtttggcgtttgtcatcagagccaaccacgtccgcagacgtggttgctattcagataacgtcgatttcagcgacactcgggtaaatccagctggggcggaaaggcatactgtcgatatcgtcgaggctgctaacaccagaaagcaccagaatcgtctccagacctgcctggaagccggccagaatatcggtacgcaggttatcgccgacaatcaccgtttcttcgctatgcgcctgcattttgtttaatgctgcgcggatgatccacgggctgggcttaccaacatagaacggtttgcgcccggagattttctcaatccctgcacacaacgcgccacaagcgggataaaaaccgcgcccgtgggtgtccggattggtggcgataaaacgtgcaccgttagcgacgaaataggctgctttatgcatcatgtcccagttgtaggaacgcgtttcgccaacaatcacgaaatcagggttcacatcggtaatagtgaaaccggctttgtacagttcatgaatcagtgcgccttcgcccaccacatacgctttcttgccttcctggcgacgcaggaaatcggcagtcgccatcgcagaggtataaaacacgctgtcaggtacatcgacacctgcggtggcaaagcggttcgccagatcttgcccagtctggctaggatagttggtcagcaacaccagcggcaggcctttatccataatcccgtgcaaaaattccgctgcacccggtacggcgacgttatcgtgcatcagcacgccgtcgatatcgcaaattacatttttaatggtcatggactacccagaatattgacaacaataagcgccactataaaagcacattaattttccagcaaatgctggagcaaaataccgttgagcatggcgcgttttaccagcgcaaaagcgccgattgcgctgcggtgatccagctcagaacgtaccaccggcagattagtgcgaaacgccttcagcgcctgggtattaatgcagctttcaatagcagggagcagcactttatcggcttcggtgatttcaccggcaataacaattttttgcggattaaataagttgatagcaatggcgatggttttacccagatgacgaccgacatactcaattacttcgctcgccagactatcgcctttgttcgcggctttgcagatagttttgatggtgcagtcgtccagcggcacgcggctctggtagccctgctttaacagattcaacacccgttgttcaatggcagcgttggcagcgatagtttccaggcagccaaagttgccgcagtggcagcgttcacccagcggttcgacctgaatatggccaatttcaccgacgttgccgttgcggccaataaaaatgcgcccgttagagataatcccggccccggttccgcgatggacacgcaccagaatggagtcttcgcaatcctgacttgcaccgaagtagtgctccgccagcgccagactacggatatcgtgaccaacgaaacaggtcactttaaaacgttcttccagagcttctaccagcccccagttttctacctgaatatgcggcatgtaatgaattttgccgctgtccgggtcaacaagccctggcaggatcacgctaatcgcgatcagctcgcgcagtttgcgctggtagctatcaataaactgagcaatggcattcaacagggcatgttccagcgtttgctgggtacgttccggcagcgggtaatgttcttctgccagcactttgctgctgagatcaaacagagtgatggtggcgtcatgacgaccaagccgtacgccgattgcgtggaaattgcgggtttcggtgacgatggagatagcgcggcggcccccggtggaggcctgctgatcaacttctttgatcagcccgcgttcgataagctgacgcgtaattttggttacgctggcgggggcaagctggctttgctcggcaatctgaatccggctgattggcccgtactggtcaatcaggcgataaaccgccgcgctgttaagctgttttacgagatcaacattacctatctgagcttgtccgcctggtgtcatactttctcttattgagttacgacctcgttaccgttaacgatggtcttggtgattttaaaatcaggtgtgaatgcagtcaggttggctactttacctgcggcgagtgtgccgagacgtttctcaacgccaatcgcacgcgccggatagagcgtcgccatacgtagcacttcatccagtgcgataccgcaatgttcgaccagattacgcacgccttcaatcatggttaaggaactaccgcttaacgtaccgttctcatccacacaaagtccgttacggtagtatattgttttacccgcaaaaatgaactgttcaatgttggcacctgctggcgcggtggcgtcagtaaccagacacagtttgtcgcctttcagacgtttagcgttgcgaatgttggcgtaatcaacatgcaggccatcagcaataataccgcaataaatgtcagcttcgtcgaggatcgcgcccgccaggccaggttcacgaccggtaatatacggcatcgcgttgtacagatgggtggcaaaggtaatccccgcgcggaaaccggcttttgcttctttcaacgtcgcgttggagtgaccggcagaaaccacaatcccggcatttgccagtttgctgatgacttccgcaggaaccatttccggtgccagggtcactttggtaatgacgtcggcgttttcacacaggaaatcgaccagcgcggcatcaggcttacgcacaaaattcggattatgggtgcctttttttaccagattcagccacggaccttccagatgcagacctaacgcctgattcggatgttttgccaggtactcgcgcataacgcgcacgccctgtttcatcagctcatcgctggtggtgataagcgtcggcagatagttagtacagccacttttctcattggctttctgcatgatttccagcgtttccacgctgaccgcttcagcggtgtcgttaaactgtacgccgccgcagccgtttaactgcacatcgataaaaccgggggagagaatggccccgttcagactacgttgttcgatctctggcggcagttccgctaccggacagacgcttttaatcaggccatcagcgataacaaccgcgtggtcatcaagaaattcgtggccggtaaagatccggccctgggttaatgcatacattctgacccccgattttaaaaaatattgccctgagcaaggagccagggcagggataacaattacagacctttgatattttctgcttctaattcattgaaatatcttaaagtcttaactttcagctccatggtggaaggttcatcgcacaccatgatcgctttcggatgcagttgcagacagctgatggtccacatatggttcacgcaaccttcaacggcggcctgcagcgccagtgctttctggctacccagcaccagaatcatcacttcttcggcatccagcagtgtaccaacaccgacagtcagggcatattttggcacctgattaacatcgttatcaaagaaacgagagtttgcgacgcgagtgtcatgagtcagggttttgatacgagtacgagaagccagagaagacgccggttcgttaaatgcaatatgaccgtcgttacctacaccgcccataaacagatgaatttttccgtaagaacggattttttcttcatactggcggcactcggcgtcgatatccggggcgttgccgttgagaaggttgatgttttctgctggaatatcaacgtgatcgaagaaattacggtgcataaagctgtagtagctttccggatgctctttcggcagaccgacatattcgtccatgttgaaggtgacaacgtgcttaaagctgacctggcctgctttatgcatttcgactaacgctttataggtggtcatcggcgtgccgccagtcggcaggcccagtacaaacggacgatcggcagtcggtttgaacgcattgatacgattgacgatatggcgagcagcccatttgccgacctgttcagcggtagtcagggggatcagtctcattattcacctcaataagtaaaatgtaagccgttggcggattaggcatctttaagcgtaacctggatttgcgcagacaggcgtcaatccgacctgattttttgaatgataaaataagttttctggtttagccagtaaaagggagtgataataacgatatttggtgacaaaactcacaaaagacacgcgtttaatttgcgatacgaattaaattttcacacactctgtagcagatgatctaacaatctgattacagaacatcggcagtacaatttgcagcaaaataaaaatacggcttgaaacgagccaaatagggttctcgtagggggaataagatgaatattttaggttttttccagcgactcggtagggcgttacagctccctatcgcggtgctgccggtggcggcactgttgctgcgattcggtcagccagatttacttaacgttgcgtttattgcccaggcgggcggtgcgatttttgataacctcgcattaatcttcgccatcggtgtggcatccagctggagcaaagacagcgctggtgcggcggcgctggcgggtgcggtaggttactttgtgttaaccaaagcgatggtgaccatcaacccagaaattaacatgggtgtactggcgggtatcattaccggtctggttggtggcgcagcctataaccgttggtccgatattaaactgccggacttcctgagcttcttcggcggcaaacgctttgtgccgattgccaccggattcttctgcctggtgctggcggccatttttggttacgtctggccgccggtacagcacgctatccatgcaggcggcgagtggatcgtttctgcgggcgcgctgggttccggtatctttggtttcatcaaccgtctgctgatcccaaccggtctgcatcaggtactgaacaccatcgcctggttccagattggtgaattcaccaacgcggcgggtacggttttccacggtgacattaaccgcttctatgccggtgacggcaccgcggggatgttcatgtccggcttcttcccgatcatgatgttcggtctgccgggtgcggcgctggcgatgtacttcgcagcaccgaaagagcgtcgtccgatggttggcggtatgctgctttctgttgctgttactgcgttcctgaccggtgtgactgagccgctggaattcctgttcatgttccttgctccgctgctgtacctcctgcacgcactgctgaccggtatcagcctgtttgtggcaacgctgctgggtatccacgcgggcttctctttctctgcgggggctatcgactacgcgttgatgtataacctgccggccgccagccagaacgtctggatgctgctggtgatgggcgttatcttcttcgctatctacttcgtggtgttcagtttggttatccgcatgttcaacctgaaaacgccgggtcgtgaagataaagaagacgagatcgttactgaagaagccaacagcaacactgaagaaggtctgactcaactggcaaccaactatattgctgcggttggcggcactgacaacctgaaagcgattgacgcctgtatcacccgtctgcgccttacagtggctgactctgcccgcgttaacgatacgatgtgtaaacgtctgggtgcttctggggtagtgaaactgaacaaacagactattcaggtgattgttggcgcgaaagcagaatccatcggcgatgcgatgaagaaagtcgttgcccgtggtccggtagccgctgcgagtgctgaagcaactccggcaactgccgcgcctgtagcaaaaccgcaggctgtaccaaacgcggtatctatcgcggagctggtaagcccgattaccggtgatgtcgtggcactggatcaggttcctgacgaagcattcgccagcaaagcggtgggtgacggtgtggcggtgaaaccgacagataaaatcgtcgtaagtccagccgcagggacaatcgtgaaaatcttcaacaccaaccacgcgttctgcctggaaaccgaaaaaggcgcggagatcgtcgtccatatgggtatcgacaccgtagcgctggaaggtaaaggctttaaacgtctggtggaagagggtgcgcaggtaagcgcagggcaaccgattctggaaatggatctggattacctgaacgctaacgcccgcagcatgattagcccggtggtttgcagcaatatcgacgatttcagtggcttgatcattaaagctcagggccatattgtggcgggtcaaacaccgctgtatgaaatcaaaaagtaatctgctttatgcctgatgcgacgcttgagcgtcgcatccaacaatgacaagcggtggagatcttctctgccgctttttttttcatcaatcatccccataatccttgttagattatcaattttaaaaaactaacagttgtcagcctgtcccgcttataagatcatacgccgttatacgttgtttacgctttgaggaatccacgatgagtgaggcagaagcccgcccgactaactttatccgtcagatcatcgatgaagatctggccagtggtaagcacaccacagtacacacccgtttcccgccggagccgaatggctatctgcatattggccatgcgaaatctatctgcctgaacttcgggatcgcccaggactataaaggccagtgcaacctgcgtttcgacgacactaacccggtaaaagaagatatcgagtatgttgagagcatcaaaaacgacgtagagtggttaggttttcactggtctggtaacgtccgttactcctccgattattttgatcagctccacgcctatgcgatcgaactgatcaataaaggcctggcgtacgttgatgaactgacgccggaacagatccgcgaataccgcggcaccctgacgcaaccgggtaaaaacagcccgtaccgcgaccgcagcgttgaagagaacctggcgctgttcgaaaaaatgcgtgccggtggttttgaagaaggtaaagcctgcctgcgtgcgaaaatcgacatggctagtccgtttatcgtgatgcgcgatccggtgctgtaccgtattaaatttgctgaacaccaccagactggcaacaagtggtgcatctacccgatgtacgacttcacccactgcatcagcgatgccctggaaggtattacgcactctctgtgtacgcttgagttccaggacaaccgtcgtctgtacgactgggtactggacaacatcacgattcctgttcacccgcgccagtatgagttcagccgcctgaatctggaatacaccgtgatgtccaagcgtaagttgaacctgctggtgaccgacaagcacgttgaaggctgggatgacccgcgtatgccgaccatttccggtctgcgtcgtcgtggttacactgcggcttctattcgtgagttctgcaaacgcatcggcgtgaccaagcaggacaacaccattgagatggcgagcctggaatcctgcatccgtgaagatctcaacgaaaatgcgccgcgcgcaatggcggttatcgatccggtgaaactggttatcgaaaactatcagggcgaaggcgaaatggttaccatgccgaaccatccgaacaaaccggaaatgggcagccgtcaggtgccgtttagcggtgagatttggattgatcgcgccgatttccgcgaagaagctaacaagcagtacaaacgtctggtgctgggtaaagaagtgcgtctgcgtaatgcttatgtgattaaggcagaacgcgtcgagaaagatgccgaaggtaatatcaccaccatcttctgtacttatgacgccgataccttaagcaaagatccggcagatggtcgtaaagtcaaaggtgttattcactgggtgagcgcggcacatgcgctgccggttgaaatccgtttgtatgaccgtctgttcagcgtgcctaacccaggtgctgcggatgatttcctgagcgtgattaacccggaaagcctggtgatcaaacagggctttgctgaaccgagcctgaaagatgcggttgcgggtaaagcattccagtttgagcgtgaaggttacttctgcctcgatagccgccattctacggcggaaaaaccggtatttaaccgcaccgttgggctgcgtgatacctgggcgaaagtaggcgagtaattttaagtttcgctatgccggatggggcgtttacgtcgcatccggcaaggaacagacaaacagtttcaaacgctaaattgcctgatgcgctacgcttatcaggcctacatgatctctgcaatatattgagtttgcgtgcttttgtaggccggataaggcgttcacgccgcatccggcaagaaacagcaaacaatccaaaacgccgcgttcagcggcgttttttctgcttttcttcgcgaattaattccgcttcgcaatttatccataaaataaatttaaaataacaaaacataattaaataaaatgtaaccgctttcatcttgctggaatttcacgcttttattcttctgcaagcctttcaaccgcaaacttaagccttgtaacaaaaatcatcaaaatatgtgcggttgctcatgttcttacattctggttacagaaagagattgataattcgcgtcgcgaaaaatagtctgttcctgtagtcagcgagacttttctcaacgctacttttttaatttttattttttcgctgttcacctttggtgcagcaatttatacgtcaaagaggattaacccatgcgtacgtttagtggcaaacgtagtacgctggcgctggctatcgccggtgttacagcaatgagcggctttatggcaatgccggaggctcgcgccgaaggattcatcgacgatagtaccttaaccggcggtatctattactggcagcgtgaacgcgaccgtaaagatgttaccgacggcgacaaatacaaaaccaacctttctcactccacctggaatgccaacctcgattttcagtccggttatgctgctgatatgttcggccttgatattgctgcgtttacggcgattgaaatggcggaaaacggcgacagctcccacccgaacgaaatcgcgtttagtaaaagtaataaagcctatgacgaagactggtccggcgacaaaagcggtataagcctgtataaagctgcggccaaatttaaatacggtccggtttgggcgagggcaggttacattcagccaactggtcaaacgctgttagcgccgcactggagctttatgccaggtacttatcagggggcggaagccggggcgaattttgattacggcgatgctggtgcgttgagtttctcctacatgtggaccaacgaatacaaagcgccgtggcatctggaaatggatgagttttatcagaacgataaaaccaccaaagttgattatctgcactcctttggggcgaaatacgacttcaaaaataacttcgtactggaagcggcatttggtcaggcggaagggtatatcgatcaatattttgccaaagccagctacaaatttgatatcgccggtagcccgttaaccaccagctaccagttctacggtacccgagataaagttgacgatcgcagcgtcaacgacctttatgacggcaccgcctggctgcaagcgttgacctttggttaccgggcggctgacgtagtggatttgcgcctcgaaggcacctgggttaaggctgacggtcagcagggatacttcctgcaacgtatgactccaacctacgcttccagtaacggtcgcctggatatctggtgggataaccgttctgacttcaacgccaacggcgaaaaagcggtcttcttcggtgcgatgtatgacctgaaaaactggaatcttccaggcttcgccatcggcgcttcctacgtttacgcatgggatgctaaacctgcgacctggcagagcaatccggatgcgtactacgacaaaaaccggactattgaagagtctgcctacagcctggatgcggtctataccattcaggacggtcgcgccaaaggcacgatgttcaaactgcatttcaccgaatacgacaaccactccgacatcccaagctggggcggtggttacggcaacatcttccaggatgagcgtgacgtgaaatttatggtaatcgcaccattcaccatcttctgatgcccgacgcggcaggttttgtgcctgccgcacgtttgaggaatttgctatgaaaaaactgattctcatcgccataatggcaagcgggctggtagcttgtgcgcaaagtaccgcgccacaggaagacagtcgtctgaaagaggcatacagcgcctgtatcaacaccgcacaaggtagcccagaaaaaattgaagcctgccagagcgtgttaaacgtgctgaagaaagagaaacaacatcagcagtttgccgaccaggaaagtgtacgcgtactggattatcagcagtgtctgcgtgcaacgcaaaccggaaatgatcaggcggtgaaagccgattgtgataaagtctggcaggaaatacgcagtaataacaaataagtgagagctgtaactctcgcttttcttatttcccttgcataaaaaagccaacccgcaggttggcttttctcgttcaggctggcttatttgccttcgtgcgcatgttcatcttcgcggcaatcgccttcggcacagtgaccgtaaagatagagactgtggttagtcaggcgaatgccatgttttgcggcaatttcacgctgacgcgcttcgatggaatcatcactaaattcgataaccttgccgcagtcgaggcagatcaggtgatcgtggtgatgttgctgtgtcagttcaaatacggatttaccgccttcaaaattgtggcgggtgacgataccagcgtcgtcaaactggttcagtacgcgatataccgtagccagaccaatttcttcacccatatcgatcagacgtttgtataaatcttccgcactgacgtgatggttgtccggctcctgaagaacttccaggatttttaaacgaggaagcgttactttcaggccagctttctttagggcggtattgttatcagtcatgcggaatctgtcctgttactaagcggttcacttcattagaagaagtgacagaatttgctcttgagataatgcgtatcattatagaattgccacgcctaaatgaaaaccacaagtccctggcaaatattgttaataaaaacgtggcacagcttacatttacaacggcaaggccacttgaacaccgggacattgtacaggtacaacagcaaaagttacaaatttgtagcaattattttgattggcattatctattaatacggcgtagacatgagtctacgccgcatcacatcaggcattgagaatttcgtcgagatgcaactcttcagaaatctgtttaacccatttttctacacgttcagcggtcagttccggctgacggtcttcgtcgatagccagaccgacaaagtggtcgtcatctgccagacctttacttgcttcgaaatgatagcccgcagttggccagtgaccaacgatggttgcaccgcgcggttcaatgatgtcgcggatggtgcccaatgcgtcgcagaaatattcggcgtaatcttcctggtcaccacaaccaaacagcgcaaccagtttgccgttgaaatcaatctcttcgagagtcgggaagaagtcatcccagtcacactgcgcttcgccgtaataccaggttgggatgcccagcagcagaatgtcataagcttccagatcttctttgctgctttttgcaatgtcatggacatcggcaacgtctttaccaagctgtttttgaatcatttttgcgatattttcggtattaccggtgtcgctgccgaaaaagatgccagtgatagccatgagtgaaataacctcttgaaacttattgaaatgggggtggaaaattgcccacggataaaggcaatcatagcagaacaggcagtcttgcggaatcagcaaacgagcaggactgcacactgtgctacatgaaagtggaaatttaaacgatgccctgactacgcagcgccgccagttgctgcattaacatctcttcgatcagttcgctacggctcatattgcggctctccgccagctcgttcagcgcctcgacagcttccgcgttcagcttcagttcgacacgcttaaggccacgtactttgtcgcgttttagctggttgcgtttattaatacgcagctgttcatcgcggctaagcggattagttttcggtcgtcccggtcgacgctcgtgcgcgaacagatctaatgtcgtacggtccgtttgttctttggccatgatcttggtgacttcgggggaaacaatcagccaggcctctgcccggatggatagcgcgccataatacatcagcgcgatgagtcacgccaacgcccacgcgcggaaagcgacgcggacgctgggtttttaatcagttgcgttaatcattgagatagcgacggatagcgcgtaataccgcatccggtttttcagcatggacccagtgacccgcgcctgcaatcacatgcgcccgtgcctgtggaaattgagccagtaaatcatcacggtactgctcgctaacatacggagaattgccgccagggataaacagggcagggtgatcccatgccgggattttctcccaacctacaatatgcggatactgatcccacaataccggcacgttaaagcgccactccccgtcaacaaaagatttcagcagaaactgaatcaccccttcttcattaagatgctggcgcattattgctgctgcttgctggcgagtttgtgcgtcgctttcactgaccgcgttgatagccgcaaaaatctcatcatgacggcgtacgtgatagtcgaccggcgcgatatcgatcgccaccagtttatcgatgcgatcggaggctagtgcagtaagtgccattaccgctttaccgcccatggagtgaccgataaatgttgctttgtcgatctgctgtgcatccagagtatcaacaagatcctgcgccatcgccgggtaattcattaccggatctctcggactaagaccgtggttacgcatatcaacctggatgatattgtgatcgtttaccagatcgcgagccagtacgccaaggttgtcgaggctgccaaacagaccgtggacaagaacgatgggagaattattgtgctggttttgtgcagtttgcgcgcggatattcaatttcatggcaaagttctttttttcgcgttgtcgggttagggtattatgttgaccattgtgccacagggctgcaacaaataaggtttattccgagtttttctgcaagccaggcttgacgctatccgctgccgggatttattcatatactcctggcgacttgtattcagctaagacactgcactggattaagatgaaaacgattgaagttgatgatgaactctacagctatattgccagccacactaagcatatcggcgagagcgcatccgacattttacggcgtatgttgaaattttccgccgcaagtcagcctgctgctccggtgacgaaagaggttcgcgttgcgagtcctgctatcgtcgaagcgaagccggtcaaaacgattaaagacaaggttcgcgcaatgcgtgaacttctgcttagcgatgaatacgcagagcaaaagcgagcggtcaatcgctttatgctgctgttgtctacactatattctcttgacgcccaggcgtttgccgaagcaacggaaagcttgcacggtcgtacacgcgtttactttgcggcagatgaacaaacgctgctgaaaaatggtaatcagaccaagccgaaacatgtgccaggcacgccgtattgggtgatcaccaacaccaacaccggccgtaaatgcagcatgatcgaacacatcatgcagagcatgcaattcccggcggaattgattgagaaggtttgcggaactatctaaaacgttgcagacaaaggacaaagcaatggcaatccacaatcgtgcaggccaacctgcacaacagagtgatttgattaacgtcgcccaactgacggcgcaatattatgtactgaaaccagaagcagggaatgcggagcacgcggtgaaattcggtacttccggtcaccgtggcagtgcagcgcgccacagctttaacgagccgcacattctggcgatcgctcaggcaattgctgaagaacgtgcgaaaaacggcatcactggcccttgctatgtgggtaaagatactcacgccctgtccgaacctgcattcatttccgttctggaagtgctggcagcgaacggcgttgatgtcattgtgcaggaaaacaatggcttcaccccgacgcctgccgtttccaatgccatcctggttcacaataaaaaaggtggcccgctggcagacggtatcgtgattacaccgtcccataacccgccggaagatggtggaatcaaatacaatccgccaaatggtggcccggctgataccaacgtcactaaagtggtggaagacagggccaacgcactgctggccgatggcctgaaaggcgtgaagcgtatctccctcgacgaagcgatggcatccggtcatgtgaaagagcaggatctggtgcagccgttcgtggaaggtctggccgatatcgttgatatggccgcgattcagaaagcgggcctgacgctgggcgttgatccgctgggcggttccggtatcgaatactggaagcgtattggcgagtattacaacctcaacctgactatcgttaacgatcaggtcgatcaaaccttccgctttatgcaccttgataaagacggcgcgatccgtatggactgctcctccgagtgtgcgatggcgggcctgctggcactgcgtgataagttcgatctggcgtttgctaacgacccggattatgaccgtcacggtatcgtcactccggcaggtttgatgaatccgaaccactacctggcggtggcaatcaattacctgttccagcatcgtccgcagtggggcaaagatgttgccgtcggtaaaacgctggttagttctgcgatgatcgaccgtgtggtcaacgacttgggccgtaaactggtagaagtcccggtaggtttcaaatggtttgtcgatggtctgttcgacggcagcttcggctttggcggcgaagagagtgcaggggcttccttcctgcgtttcgacggcacgccgtggtccaccgacaaagacggcatcatcatgtgtctgctggcggcggaaatcaccgctgtcaccggtaagaacccgcaggaacactacaacgaactggcaaaacgctttggtgcgccgagctacaaccgtttgcaggcagctgcgacttccgcacaaaaagcggcgctgtctaagctgtctccggaaatggtgagcgccagcaccctggcaggtgacccgatcaccgcgcgcctgactgctgctccgggcaacggtgcttctattggcggtctgaaagtgatgactgacaacggctggttcgccgcgcgtccgagtggcacggaagacgcatataagatctactgcgaaagcttcctcggtgaagaacatcgcaagcagattgagaaagaagcggttgagattgttagcgaagttctgaaaaacgcgtaaacacatttaataaaaaaagggcggtcgcaagatcgcccttttttacgtatgacaaacacagaattgcctgatgcgctacgcttatcaggcctacgaggatggtgcaatatattgaatttaagcgattttgtaggccggataaggcgttcacgccgcatccggcaaaaacaacgaacactttgtcaacaaactgagtagctcaaggaaatcccaatgaagaccaacaggagtctggtcgtcatagtgagtctaattaccgccacattactgctgactgcatgcgcccaacctgaacaaagtagtttagctggcgactggttactgacccctaaagataaaaccagaggattaacgggtagcattgcggtaaatattgcacctttccggtgtaagacaaattgccgtggtgataacttacctgataatacccgccgctggcagttgagtggcgggaacgaaaaagaacttacttatcttcataatatgagtgcacaagaaaaggtcggtttaaatcccggttggcaatgctacaccagtttttttatgcgggtttgccagggcaagcccggcactcgaccgatagtcaatgaggattatgtcagcgaaagcggattttttggcagcatgatgcatgtcgggattattgagttacgacgctgccagagtgaaaattgccagcaagaattgaaagcgataaatacacattaaaatagtgagtccgggaatgaaacccggacctgaacatgtcttattgcgtgaatgtttctttcatttgatactgcatttcccagagttcagtaaggctaataacttttcttgttcttgcttcttcactttgtacccataagaaagggtagaacgtgaaggcttccgttgcgcttaattttattacgtcttctcgccattgctgccatcgtacattttcatagaaggtatctaaatcaccggataatgcccactgaagaaactcagaatatccaacttccagactttcccaattcagcgtatctggcgcaaaataataaacgcagccagtatcttccccaagatcgccaccattaagagcaaaaattacccctgcgacatcgtcagcgatgggtaaagcccgcacgcctgcgaattcagggcgttgtgtccaacttactggatctcgtggcaaccgggggtgaccagatcctgctatgcgtaattaaccattatcaatcagcagacctccggagccatagacaagcgcacccatcggactttttgttgtcacctgtaattgataaagtgcggtttcggctaaatctttattaaccggtaagagttcggtatggtttgtggcgtcttttaaccagttctggattattggccaggcactatcttcagtatttactaactgattcatttcacgcatcgctacttgctccttgtgtgctacggtgtcatttatgatgaggaattgtatggaacattttttaaatattaagttccttatatttgaataaaaaatgactttatccatacattgccacttttttcaaagcataaaccgatacccaataccggtttcagtaataaaatggcgaggccgggccggatcctgttccagtttttgtcgcagatgccccatataattacgcaaatagttgctgtgttcgatcgcgtttagaccctacatctgccggatgcggcataaataacgaactatttgccaacaaacagaaagggcgatcattcaatcgcccttttttactttgttttattaaccgtgtttatttttcagttcaaagcgtggacttaccagaccatacagtgtccaaccaaggaaggtcacgatggaaccgtacagcatggcttcttccccggaactgtacagcgcataaaagctatacatcgcgccaacaaaagcaacaaagtttgcaactttcgctttactggggggcacattagcgaccttctgaataatgactaatgccgccatactcagaatatacggaatgatattggtcaccacggccaggttaaccagcacgttgaactgactgtttaggctcgggctaatggtcatcagtgccaatccactctgaataatcacaatggtcaacattccctgcaccggtgcatccactttggttacacgggagaaaattttagggaagtagccttcatcagaactagatttaaacacctgggcaatggtgaactgccagccaagtaggctaccgcagcaggacatcaccatcagcgccataatgactttacccacttccggcgtgaacatctgcgcgaaggccagaccaaatggtgccgtactatttgccagctccatatttggcacaatcccggcaatcacgttggtggagacgatataaatcaccgccgcacctaacgtaccgccgagtaccgcgattggcacattacgttccgggttttccactacatcagtattcgcacacgcagactccagaccaagaaaagcccacagcgtcatagcgatggaagaacctaccgcactgaagaacggtgcatgatgcggattccaggaatcaacgtacagcgtcgggctaaaccagaaccagccaataatgcacagaccgacgaccggaataatgaccccccacacggtaatgctactgatttgcccggtaatgcgcgcaccaccaaagttagccacggtacaaatccacagcaccccgatggtcgcaagaccaatctgcactgggctcaaactcgcgccgagcagttcggtgccgtaaccaaccgcgctaatagcaatcgcgacgttagcaatcagcagactgacgccgtaggtatagttcgccataaagttaccggatttaccgaaagcatactcggcataaccgcccataccgccacttttacggctgaacataccgcattttgcgaatgcccatgccagtgccatactgcctacggctgtcaccagccaggagataatactgattgtcccgacttcggcaagctttgtcggcagcatgatgataccggagcccatcatgttgaccatcgtcagtatggttaactgaacgacgcccattttgttgcttttagcctgactcataatttttcccctttcaacagggtgctttgcgcatcacgaggcttgatgacatagcaccaaacttgcttacgaccatcatgttcttcgatatagacaccctgcagctccggtgcaaaacctggcagcaggttgatcccttcttccagagcgctgaagtaacgcagaacagcaccaccccagatttcacccggaacaacacacagcacacccggaggataaggaagcgcaccttcggcagcgatacggccttctgcatccggcagacgaaccagttccacttcaccgcgtaaataggcgtagttggcttcttgcggattcatgctgacgcgtgggaagtgctccttacggaacatctctttttgcagttgtttcacgttgtggcgggcatacaaatcatgcatttcctgacacaactgacgcagggtataaccggcgtagcgctcttcatgctgtttgtagatggaaggtagcacttctgctaatggcgcgtcggactcaagcagtttttcgaagcgtaccagcagggcaacaagttgctgaagtttggccatatcttctgccggagtcagcaggaagaggatggagttaagatcgcatttttccggcactacgccattttcgcgcaggaagttagcaagaatcgtcgcgggtacaccgaacgcttcatattcgccgttacgtgcatcaatacctggggttgtcagcaacagtttgcatggatcgacaaagtattgattctctgcatagccttcaaaagaatgccagtgttcccctggtacaaactggaagaagcgcagatcaaccgcaatttgcgctgtttcatagctctgccagggtttaccatccaccagttcaggtacgaacggacgaatatgctgacagttatcgaggatcagtttgcgggcattaatgccatttaccacacaatccatccacatattacgaccgctgacaccttcatgcattttggcgttgatattcagtgcggcaaacagcggatagaacgggctggtggaggcgtgcatcataaaggcgttgttcatgcgtttgtgcggtacataacgctgttgccctttgatgtggctgtcttttttatgaatttgactagtctgagaaaaaccagcctgttgtttatgcacagattgcgtaaccagaatacccggatcgttctcattaagatccagcaacagcgggctacagtccgccatcatcggaataaactgttcatagccgacccatgcactgtcaaacaggatgtagtcacacagatgaccaattttatccaccacttggcgggcgttataaatcgtaccgtcgtaggtgcctaactgaatcacagcgaggcggaaaggacgagcctcttttgcccgctgcggtgcgacttccgcgatcagctcacgcaggtaactttcttcaaaacagtgcgcatcaatgccaccgataaagccatacgggttacgtgccgtttccagataaaccggtgttgcaccagcctgtagcaacgctccgtggtggttagatttgtggttattgcgatcaaacagcaccagatcacccggtgttagcagggcgtttaaaaccactttgttagaagaactagtgccatttaaaacgaagtaggttttatcggcattaaacacttttgccgcatgttgctgtgcaatgcatggcgcgccttcgtgaatcagcagatcgcccatcgctacgtcggcgttgcacaagtcggcacggaacagcgcctcaccaaagtattccacaaactgattccccgccggatggcgacggaaaaattcgccgccctgatgaccagggcaatcaaacgcgctgttaccttgattgacataatcgaccagtgcgcggaagaaaggtgggcgcagttgagtttcataatggctggcagcggtttctaactggcgaccataaaattctcgtcggctttcgcaattctcaaagacaccgctaatacggggcaaatactctgcgggtacacgttcttgattttcagtagcaataaataccgggatgccataacccgtggcatcgatttcatcgagttttccgcatgtaacatcgttgaggcttaaaactattgccgccacatcgatattacgactttcattaatgtagatacattctcgctgcgtggtaaaacagtccgggcaagaatcactaaccgcaatttttaatttactcatttttcatctctttattttaggtaatagcaggtcctcaatttctcgaatgagaaatcgatcgtgccggaaaaaagcaaagttaccccgctgataaataaatcaggtagattgcttttttcagaatgcagaaacccttaccagtcaggtggctgataatacaagggttaacagagaatgagcactgcggaatacaggcatatgcctgtaatacagagagtcaggaagacctgtacgctgaagtgcccttagtcggtagactaacgggcattgaagaagtgaaagtcgaagctattgcgatgagcaaacttcataatatgagttgtccgccttatatggggcatagtgcggctgttattttccatttaatttacctttcctgatgtgaatgaaggtgaagatattctatccaggaaatacggttgaactgtgaaggtgatcaataaaaaatgatcaatcttaatttatttaatgatgagctttttactcagtaatataaaatattgaattgttatttttgtgtgttgtttaagataaaaagccgtatttattattacggctttaattaataaaaggcaggctgtattaaaattaatattcaaagcataaaccgatagccaataccggtttcagtaatgaaatggcgtgggcgggcgggatcctgttccagtttttgtcgcagatgtcccatataaatacgcaaatagtgactgtgttcgaccgcgtttggcccccacacctggttaaggagctggcgctgggtgagtacttttccggcattgttgagcagcaccgccagcaggcggaactcaattggtgtgagatgcacctcttcctcaccccggtgaatcacgcgggcggctaaatcgacggtaacatcggaaaattttaccagcggatcgggcgcggtggtggcagagtggcggcgtaatgcgacgcgcagacgggcctgcaattcgccaatgccaaacggcttactcagataatcatccgctccggcatccagcgcggcgattttgtcgctctcttcgctgcgtgcggaaagcacaatcaccggcaccgcgctccactggcgcaggtcgcggataaactcaatcccatcaccatcgggcaggccgagatcgagaataatcaaatctggcttacgggttgccgcttccagcaagccgcgttgcagcgtttcggcctcaaagacgcgcatcccgtcgccctccagcgccgtgcgcagaaagcgacgaatagcctgttcatcttcaacaatcagaacgtttgtcacatatcctcatgaaattcttcaagttcaggggcagtttgctggggaagtgtaacacgaaaacaggcaccaccttccggtcggttgaacgcggtaatagtgcccccgtgtacatccactatcgcccgacaaattgccagtccaagccctacccccggtactgcgctctctttattcccgcgagcaaacttatcaaatatcgtctgctcctggcctggcggaagaccggggccgttatcccagacatccagttgtagattttcgccctcaacgtgggcatcgataccaatttcggcctgcgcacccgcatatttcaccgcgttctccagcagattaatcagcacccgttcaaagagtggcccgtcaacgtggattaaggtcagcggttctggcagagaaagattgatggggctgcttaaacccggttccagcatttgcagcgcgctgccgactacttcttccagcgttaaccactctttcttcaaattaaagccgccggactgaattcgcgccatatccagtagattattcaccagtcgggtagtgttcagcacatgctgacggatctcgctggcctggcgggcgtggggacttccttcgcttgccagatcgagcgttaagatttctgcctgaccaaacagcaccgtaagcggcgtgcgtaaatcatggctaagcgccgccagcagggcgttgcggatctgttcacgttcgcttgccatccgcgcctgttcttcgctggcggttagcgtcagccgctcaagggcattggcgactaacagcgtaaacgtctccagcaggcgctgctgttccgggatcatcaactggcgcagattccccggctccaccaccaccagcccgtaggttttctcgccgctttttagcggcaaaatctggtacggtacaccgggtaacgtgtcggtgcccgcgcccgcaggcaggcctttatcaaaactccactgcgcgatggcatcgtcccacggcgtcattccttgcggatgtgttaacggctgcaatttaccgttgtcatcgggcaacaacacctgactgcgggcatgaaacgtggaggcaataaattgttcgctggtggcagcgatatcctgcggactgcggcccaccgccagagctttgctcatttcatataagtgccgtgtgcgttgctcgcggtaacgggctacccgcgcctgataacgcacgccagcagtaaggttcccgatcaccagcccgacggttaacatcaccgcgaaggtcagcagatattgcacatcagagacggcgagcgtgccgcgtggggcgataaaaaagagatcgaaactcactacattaatgacggtggcaaccacactaggccagcgtccataaaatagcgccaccaccaccacgccaagcagatacagcatcaccaggttggcggcatcaaacgccatcagccactgcatggcaattaaggtgataacggcgcataacgcggcggcaaccacgcatccctgaatttgtacacgccacttgtctttaaaagagcggttatccggcgcgttgttaatcgtgcgggcgggtggttcatcaagcgcgaccagcacctgatcgagatcgggggcgatgcgcgccagtcggtcagcaaacgtttcccgacgccaccagcggcggctggccgggcgaccgagaataatcttgccgagattatgttcacgggcataacgcactaccgctttctcttccgctggatcagaaagtgttgccgtctccgcgcccagttcctgcgccagacgtaaggcgctgagaattgcccgacgttttttttccggtaagcggtgcagggcaggggtttcaacatacaccgcgtgccagacgctacccagccgactcgccagccgcgccgctgcgcggaccagtttttcgctgccggtgttatggccgatgcataaaaggatcgcgtcgcgcgtgcgccacactttctcttcgccaggatgcccccgccaggcgcgcatttgctcatcaacgcgatcggcagtacggcgcagtgccagttcgcgcagggcgatcagattacctttgcggaaaaaatgttcaatggcgcgctccgcctgcccggcaatatagactttgccttctttcagccgctggcgcagatcgtccgggggcaagtccaccagcaccacgtcgtcggcggcatcgaaaaaaggatcgggcacggtttcccgtacctgaattccggtgacgccgctgaccacatcattcagactttccagatgctgaacgttgacggtagtgaaaacatcaatgccagcttccagcagttcttcgatatcctgccagcgtttgggatgacgggaacctggcgcattactgtgcgccagttcgtccattaagatcagcgccgggcggcgggcgagggcggcatcgagatcaaactcgctgatatgccgcccacggtacgcctggcgttttaacggcagaacagccagcccttccagcatggcggcggtatcttttcgcccgtgggtttctaccacgccaaccacaatatccagcccttgcgcccgcagtcgctgggcttctgccagcatcgcccaggtcttcccgacgcctgcacaggcaccgaagaaaactttcagcttcccccgatgcggcgcggcagtttgttccagcagacgatcggggtcgggacgtaagggttcgttattcatcaagtttatccagcgccagattgagttcaacaatgttgacaaccggctggccgatatatttcaccagcggttgttggctgtattttgcgatcagttgcgtgagctgttcaacgctgagattacgcgctttcgccacgcgtgggatttgccaggccgccgcttgcggggtgatattattgtccagcccgcttgcgcttgccgtcaccagttcaaccggaacgctcgcgctggcatccgggttagcggcccgtaatgcagcaacgcgtgcggctattagtttatccagctcagggttactgaccgccagattgctcccgccagaagcctgtggattatagggcatttctgccgttgcgctcgggcgaccatgaaaatagccgttgccggtaaaattctgcccgattaatgcgctaccgcgcaccgtatcaccttcacgaatcaagctaccattggcctgccagggaaaccaccattgccccagtacggtggtcagcagcgggtaaacgccgccagtaatcaataacagaaagataaatgtacttaatgccggacgtaatccactcatggtaaacctcacaccagaccgcaaacggtcagcagtaaatcaatgactttgataccgataaacggcaccagcagcccacccagaccgtaaatccataagttacggcgcaacatggcagaagcggtaagcggtttataactcacgccttttaacgccaggggaatcaaaaagacgataatcaaggcgttgaaaatcaccgcactgaggattgcggagtcggggctatgcaggcacatgatgttcagcgcatttaactgcggatacgttgccgcgaatgccgccggaataatggcgaagtatttcgccacatcgttggcaatgctgaaggtggtcaggctgccacgggtcatcagcatctgtttgccaatgtgcaccacctcgatcaacttggtcgggttagagtcgagatcgaccatattgcccgcctctttcgccgcctgggtgccggagttcatcgccaccgcgacatctgcctgcgccagcgccggagcatcgttggtgccgtcgccggtcatcgctaccaaacgaccttccgcctgatactgacggatcaatgccagcttggcctccggtgtcgcttcggcgagaaaatcatcgacacccgcttccgcagcaatcgcggcggcagtcagacggttatcgccggtaatcatcaccgttttaatgcccattttgcgcagctgggcgaagcgctctttaataccgcctttgacgatatctttcagcgcaataacgcccagcacacgagaaccttccaccaccaccagcggcgtggctccctgacgcgcaacctgatcgactttttgatcaacatcggtagggaagtgaccaccgttagcctcaacatggcgacgaatggcatcgacagaacctttacggatcatgcggttgtcgatgttgatcccgctcatccggctttgcgcagtaaacggtacaaaggtggcatggaggctctgcacatcgcgctcgcgcaggttaaaacgctgcttggcgaggatcacaatactgcggccttccggcgtttcatcagccaggctagccagttgtgcggcgtcagccagcgttttttcatccacgccctgcgcggggataaactcgctcgcctgacggttaccgagtgtgatggtgccggttttatccagtagcagaacgtcaacgtcacctgccgcttcaactgcacgtccgctggtggcaatcacattcgcgcctagcatccggctcatcccggcgacgccgatcgcactcaacaggccgccaatagtggttgggatcagacagaccagcagcgccaccagtaccgttacgctgactgcattaccgccccacgcggaaaacggccacagcgtggcggttgccagtaaaaagacgatagtcagggcaatcagcagaatggtcagggcaatttcgttcggcgttttgcgtcgctgtgcgccttccaccatcgcgatcatccgatccagaaatgtctcgccggggttaacgctacactcaatcaccagccagtcagaaagaatacgcgtgccgccggtgacggaggcaaaatcgccgccggattcacggatcaccggtgcgctttccccggtgatggcgctttcatcgacgcttgcacccccttcaataacttcaccatcgcaggggataatatcgccagcttctaccagtacgatatcgcctttacgaagttggtcggcaggaactttgtccgccgcagcgccatatttcggctcacgcagcttgcgggcaaaggcagtttttttcacccctttcagactgttggcctgcgctttactgcggccttctgccagcgcctcggcgaaattagcgaacagtacggtgatccacagccaaccgctaatggccgcgctaaacagcgcattgccgggcatcgcaccgcttgccatcgcgatgctaatacaggtggtcagcagactgccgatccagacgataaacatcaccggattgcgccattgcgcctgcgggtttaattttttcaccgcttctttcagcgcctgaacgacaagtgttggttcgaatagcgccagttgtttacgactcatattcagtgctcactcaatatcatcaggagagatattccgccaccggaccaagcgccagggcagggataaaggtcagtgcgccaaccagcaacacggtgccgattaacaggccaacaaacagcgggccgtgcgttggcagcgtgccggagctggcggcttggctctttttactcaccaggctaccggcaattgccatcaccgggataatcaccccgaagcgaccgacaaacatgcagaacgccagtaaacagttccagaacggagagttggcgcttaatccggcaaaggcgctgccgttgttgttagcggcggaactcacggcgtacagcacttcgctaaaaccatgcgggccagggttgagcatggcgctacgtccggcgtcggtcatcatcgccaacgccgcgcccatcagcaccagcgtcggggtaaccagaattgccagtgcagtcagtttcatctcgcgtacgtcgatttttttacccagatattccggtgtacgaccaatcatcagcccggcaataaacaccgccagcaggacaaacagcatcatgccgtaaagaccagaaccgacaccgccgaacaccacttcaccaatttgcatcagccacatcggcaccatgccaccgagagcggtaaagctatcatgcatcgcaatcaccgcgccacaggaagccgccgtcgtcacgaccgcaaacaggctactgaccagcacgccgaaacggctctctttaccttccatattgatgctgctgtccgtgcccagtgccagcagatgaggattaccctgaacttctgcccacatcaccacgcctacgcagatgacaaaaatcacactcatcgcccacagcaacatgcgcccctggcggcgatcgcccatcacttcaccaaaggcaaagcacagcgccgttgggatcaagaagatcgccagcatctgcacgaagttggtcagtgcggttgggttttcaaacggatggctgctgttggcattaaagaagccaccgccgttagtaccgagcatcttgatcgcttcctgagaagctacaggccccatgggtaacagctgttgcgctccttcaacggtattcacagcctgataaggcagaaagttttgcagcgcaccttgttgaataaaaaacagtgcaatcaacaacgccacagggactagcacccataacgtgatgcgtagcagatcgacccaggcattcccgagcgtgctcatgctctggcgggtaaacgcacggatgagggcaaaaatcaccgcaatcccgctggcggcagaaagaaagttttgcaccgttaagcccgccatctggctgaaatagctcaacgtggtttcaccgctataagattgccagttggtattggtgacaaagctgacggcggtattcagcgccagatcccagctcagccctggcaactgctgtggattaagcggcagatagtgctgaccgagcaacataaaaaacagcaccgccagccccagcatgttcaggccgagaatggcacaaagatattgcttccagttcatctcacggtcagagacgccaagtgcgcgaaaaagtacgcgctcaacgcccgttgtaccgggaagaggaatgtcattaatcagccgcgccagcccgctgcctaaaggacgcgccagcaccattaacaccagtaaaaacgtggcgatcagtaagaacccttgcgcagccatcagaacgcctccgcattgatcagggcataaaccagataacccagtaataaaaacaccagcaatacgccggttatcacgcctgcactcacagtgcacctccagtggcctaaaagtgataccggaagggtagaattctggctgcaaagatttcgcaaaaatctgcgggcggggtgtaaaaaaagtataaaaatggcaaaagccatgatttaactaatgtttagtattaatttaacttttgtgtaacttaattacaggatgaatgtaaataaaccatcaataagcaaaaataagtggtcggatgagtagtaaaattacacaaaaggcggtactattttcatcagataaacaaattcatttttccggtgccattcaccgggtagatacaaaagggggagaaaagtatggaactctacagagaatatcctgcatggcttatctttttacgccgtacttatgcggttgcagcgggcgttctggcgctgcctttcatgcttttctggaaagaccgcgcccgcttttacagctacctgcatcgcgtctggagcaaaaccagcgataaaccggtgtggatggatcaggccgaaaaggcaactggtgatttttattgattgctgagttttgaatacattgaacgtctacacttactcctgtaaaccgctcaggagcagtaatgaatctacaacgatttgatgacagcaccctaatccgtatctttgcccttcatgagttacatcgactgaaagaacatggcttaacgcgcggggcgcttctcgattatcacagccgctataaactcgtctttctggcgcattctcagccggagtaccgcaaacttggcccgttcgtggctgatattcaccagtggcaaaatctggatgactattacaaccagtaccgccaacgcgtagttgttttgctttctcaccccgccaacccgcgcgatcacaccaatgttttgatgcacgttcagggttattttcgcccgcatattgattccacagaacgccagcagctggctgcgcttatcgacagttatcgccgtggcgagcaaccacttcttgcgccgctgatgcgtatcaaacactatatggcgctttatcctgacgcctggcttagtgggcagcgttatttcgaactttggccgcgtgtgattaacttgcgccatagtggagttttatgactacccatctggtctggtttcgccaggatttacgtctgcacgataatctcgcactggctgccgcctgccgcaatagctctgcacgcgtgctggcgttgtatatcgctacaccacgccagtgggcgacgcataacatgagcccgcgtcaggctgaacttatcaatgctcaactgaatgggctacaaatagcgcttgcggaaaaaggtattcctttattgttccgtgaagtggatgactttgtcgccagtgtcgaaatagttaaacaggtgtgcgcggaaaacagcgttacccacctgttttataactatcagtatgaagtgaatgagcgggcgcgggatgtggaagttgaaagagcgctgcgtaacgtggtgtgtgaaggatttgatgacagcgtgatcctgccgcctggcgcggtgatgaccggtaatcacgagatgtacaaagtctttacgccttttaagaatgcctggctgaaacggctgcgggaagggatgccggagtgcgtcgctgcgccaaaagttcgtagtagcggaagcatagagcccagcccatccattacgctgaattatcctcgtcagtctttcgatactgcgcattttccggtggaagaaaaagcggcgattgcgcaattacgccagttttgccagaacggtgccggagaatatgagcaacaacgagattttccggcagtggaaggcaccagccgtttgagcgccagcctggcaacgggcgggttaagccctcgccagtgcttgcatcgcttgttggctgaacagccgcaggcgctggacggtggggccggtagtgtctggcttaatgagctgatctggcgcgagttttaccgtcacctgataacgtatcaccccagcttgtgtaaacatcgtccatttattgcctggacggatcgtgtacagtggcagagcaatcccgcacatttacaggcctggcaggaaggcaaaacgggatacccgattgttgatgccgctatgcgtcagcttaacagcactggctggatgcataacaggctacggatgattacagccagttttctggtgaaagatttattgatcgactggcgcgaaggcgagcgatatttcatgagccagctgattgatggtgatttggcagccaataacggtggctggcagtgggccgctagtaccggaaccgatgcagcgccgtattttcgtattttcaacccgacaacccagggcgagaaatttgatcatgagggcgagtttatccgccagtggctaccggaactgcgcgatgtgccagggaaagtggtgcatgagccgtggaagtgggcgcagaaagcaggtgtgacgctggattatccgcaaccgatagtcgagcacaaagaagcgagagtacaaacgttggcagcgtatgaggcggcgcggaaggggaaataacagacgcgtcaggcaatcgagcccagatgccggatgcggcgtgaacgccttatccagcctacaaatttgtgcaaattcaataaattgcaggaaatacgtaggcctgataagacgcgtcaagcgtcgcatcaggcatcggtgctggcctattaagactccagcgccagcgcgcggtttctgaatttcagcgcctgatacagccaaatcatcagtaccagtcctacacacgccagtgcgccccaggtaatttgatcaaatacttcaatatatgcattgatggagtagttgatcgccccggaagcatcaaagctagcctggcttgtctgatcggcaatcacgcccgccagatagttcgcgatcgcgccagaaagcagcatgtagatgccggttaatacgccggtcacaccggggatttcaatgcgcgtaatttggctcatggcaaccgggtcgataaacagttccgcaaagcccatcaccgccaggcctaataccatcagtggcagagaagagtgaccatacattgcggaccagcgggcgcttaaggtcagaatgcagaatccggcgctcatcaggccaaggccaagagcaaatttcccccagatgcgcacggtacgattacccgcgacactctcttttaccacccacgccaggaacacaccgcacagcataactgcgaaggcattaatgctctggaacatcgcggtcggaacggtataaccaaacatatcgcggttaacgaagcggtcgatataaaggctaatgctgctaccgccctgttgtgcgaaggcccagaacaacatactgaagaaggtgagcgtcacaatcagccccagctccttccgctgtttctggttttctgctttgcgataaatttttgccagtacacccaggccaataatagtcgcgacaattaaggcgtatacgctccactctttccagaacagtatggtaatcagtgcaggcgttgccaccagcagaaccagcagccatccccagttcggcaggagaaagtttgtcgcacgcagtacttttttgttaacgccgcgggtatgagtgaaatgacgattgccacataagaaaatgaccagacccgcgatcatgccaaccgccgccaggccaaagcccatcgcccagctgtactcttcctgggcgtaaccacaggcgataggtgcgataatagaccccacgttacccgccgcatacatcaggctgaaaccgccatcacgacgcggatcggttggctcatacagctcgccgagcagacagcttacgttagatttaaacaggccatagccgcagacgataatcgccagggacagatagaggaaactcggatggatctcactggcacccagcaccacatgaccgatcgccatcaacaacgcccccagcatcaccgccatgcgattgccgagaactttatccgccaaaaagccaccgaggattggcgtgacatacaccaggctacagtaggcgctaaataactcgtaggcgtgagtatcgttgtattttagttgattggtgagatagagaatcagcagggcacgcatgccgtaaaagctaaaatattcccagatttgcagcgcaacgacatagtaaatagcgcgcggctgacttgcgtgtttattcataataattccacaattgacggcaacgtcacgtaatagttgcgcggcgtgcttgtgtttccttaaagttaaaactttgatacagatctgattatttatgcaatatgctgtctgattgcataaatatacattagctgaagcgtgatgatataaacaatttgcgtcttttggcgtcgggtttgtttcttaatatgtcaaaagattggctatcgacgaactggcgaggtaacgctatgttaacggtgtagctatcagaatacggaaggcgcgaagatgaaaaacaccgaactggaacaactgattaacgaaaaactgaacagcgcggcgattagtgattacgcgccgaatggtttgcaggtggaaggcaaagagacggtgcaaaaaattgttaccggtgtcaccgccagccaggctttgctcgatgaggcagtgcgtctgggcgcggatgcggtcattgtgcatcatggctacttctggaaaggagagtctccggtcattcgcggaatgaagcgtaaccgtttaaaaacgttgctggcgaatgatatcaacctgtatggctggcatttgccgcttgacgcacatcctgagctgggcaataacgcacagctggcggcgttactggggatcacggtcatgggcgaaattgagccgttggtgccgtggggcgaactgaccatgcctgtgccgggactggagctggcttcctggattgaagcgcgtctgggacgtaagccgttatggtgtggcgataccggacctgaggtggtccagcgcgtcgcctggtgcacgggcggcgggcaaagttttatcgatagcgccgcgcgttttggcgtggatgcttttattactggcgaagtttctgaacagaccattcatagtgcccgcgagcagggattgcatttttatgctgcaggtcaccatgccactgaacgtggtggtattcgcgcattgagcgagtggctgaatgaaaataccgatcttgatgtgacctttattgatattcctaatcctgcataacgaataatcagagggatcgaaagtgcaacgagcgcgttgttatctgataggtgaaacggcggtagtgctggaactggaaccgccggtgacgctggctagccagaaacggatctggcgactggcgcagcgtctggtggatatgccgaatgtggttgaagccattcccggcatgaacaatatcacggtgattttgcgtaatcctgagagcctggcgctggatgccatagagcgtttgcaacgctggtgggaggagagcgaggcgctggagccggagtctcgctttattgaaattccggtggtttacggtggtgcaggcggaccggatttggcggtggtcgcggcgcattgcgggttgagcgaaaaacaggttgttgaattgcactcctccgtggaatacgtggtctggtttttaggttttcaaccgggcttcccgtatctcgggagtttgccggaacaactacacacgccacggcgcgctgaaccgcgcttactcgttccggcaggttctgtcgggatcggcgggccgcagactggtgtttatccgctggcaacgccgggtggctggcagttgattggtcataccagtctcagcctgtttgatccggcgcgtgacgaacccatcttattacgtccgggagacagcgtgcgctttgtaccgcagaaggagggagtatgctgaagattattcgtgcgggcatgtataccactgtgcaggatggcggtcgtcacggttttcgccagagcggtatcagccactgcggcgcactggatatgcccgcgttacgcattgctaacctactggtgggtaatgacgccaatgcccccgcgctggagatcacgctcggtcagttaactgttgagttcgaaactgatgggtggtttgctctgacgggtgccggttgcgaagcgcggctggatgataatgccgtctggaccggctggcgattgccgatgaaagcaggccagcgtttaacgcttaaacgcccgcagcacgggatgcgcagttatctggcggtcgcgggtggtattgatgttccgccggtaatgggcagttgcagcaccgatctcaaagtggggattggcgggctggaaggccgtttactgaaggatggtgaccgactcccgattggcaaaagcaagcgtgattctatggaagcgcagggcgttaaacagctgctgtggggcaaccgcattcgcgccttgccggggccggaatatcatgagttcgatcgcgccagccaggatgcattctggcgtagcccctggcagcttagcagccaaagtaaccgcatgggctatcgcttacaggggcaaattttaaaacgcaccaccgatcgcgaactgttatctcacggtttgttaccgggcgtggtgcaggtgccacataacgggcagccgattgtgttgatgaacgacgcacagaccaccggtggttacccgcgtattgcctgtatcattgaggctgatatgtaccatctggcgcaaattccgctcggtcagccgattcattttgtccagtgtagtctggaagaggcactaaaagcacggcaagatcagcaacgttattttgaacaattagcgtggcggctgcacaatgaaaattgacctgaacgccgatctgggcgaaggctgcgccagcgacgcagagctattaacgctggtttcctctgccaatattgcctgtggatttcatgcaggcgatgcgcaaatcatgcaggcttgcgtgcgtgaagcaataaaaaatggtgtcgcgattggcgctcacccgagttttcccgacagggaaaattttggtcgcagcgccatgcagctgccgccagaaaccgtttacgcccagacgctgtatcaaattggcgcgctggcaacgattgcccgtgcgcaaggcggcgtaatgcgtcatgtcaaaccgcacggcatgttgtacaaccaggcggcgaaagaagcacaactggcagacgccatcgccagagcggtatacgcttgcgatccagcattgattctcgtcgggctggcgggaagcgagctgattcgtgcaggcaagcaatatggtctgacaacgcgcgaggaagtgtttgccgatcgcggttatcaggctgacggcagcctggtgccgcgaagccagagtggcgcgttgattgaaaacgaagaacaggcgctggcgcaaacgctggagatggtgcaacacggcagagtcaaaagtatcaccggcgaatgggcaacggtcgcggcgcaaacggtctgcctgcatggcgacggcgagcacgcactggcgttcgcccgccgactacgctctgcatttgccgaaaaggggattgttgtcgcagcataaccccgattaataaagaatgaaaaaaggatatcaccatgcctgaaggcccggagatccgccgtgcagcggataacctggaggcggcgatcaaaggcaaaccactaactgatgtctggtttgccttcccgcagttaaaaccttatcaaagtcaacttatcggtcaacacgttacccatgtggaaacgcgtggtaaggcgttgttaactcatttttccaacgacttaacgctctacagccataatcagctttacggcgtctggcgcgtggttgataccggcgaagagccgcagaccacgcgagtattgcgggtaaaactgcaaacggctgacaaaaccattctgctttatagcgccagcgatattgagatgttgaccccggaacaactgaccacgcatccgtttttacaacgcgttggtcccgatgtgctggatccgaatctgacgccggaggtggtgaaagaacgattattgagcccgcgctttcgtaaccgtcagtttgctggattactgctcgatcaggcgtttctggctgggcttggcaattatttgcgggtggagatcctctggcaggttgggttgactggaaatcataaagcgaaagatctcaatgcggcgcaactggatgcactcgcacacgcgttactggagattcctcgattttcctacgctacgcgggggcaggtggatgagaataagcatcatggggcgctgtttcgctttaaggtttttcatcgagatggcgaaccgtgcgaacgttgtggcagcatcattgagaaaaccacgctgagttctcgcccgttttactggtgccctggctgccagcattaagcgctccgcttcggcgcataggtactaataaaccgcgcaatggcaggccctgtcagcaaaatactgaacaggcgtagggtttgcatcgccataatgagcgccatatcggcattgctccctgcggcgatgaccgccacggtatcaagcccgccggggctggtggcgaggtaggcagtcataaaatcaatgtgcataaaccgggtcagcccccacgccatacccgcacaaatagccagcagagcaaaaatgctcagcaggatttgcggtagcgggcgtagtgcccgcagtaagatttgtttatcgaaaccaagaccaatccgccagccaattgccatatacgccatcgccagcagccattccggtagttcgatggtgatgagctgaccagactggagcactgcgcccgccagcatcgggatgagcatcgtgccggaaggaagacgcagcaggcatcccactgtaccggcaacgaccgcgagcaaaatagtaagcaggagattaatgctcactggcgggaaccagacgatatgctggttaaccgcttcagcgttatcgcccagcatcatgcgggtgaccagaacagcggcccccgcgacgaacagcactcgcagatattgcataaacgccaccaggcgaatatctgcgccgtaatcttgcgccatagcgaccattgccgccgcgccgccaggagaggagccccaggcaccggtatttccaggcaaactgctatagcgcaccaataaccaacccacaatggcgctggaaagcagcgttaccagtaaaattgcaagcacgatcggccagttgacggccagggtggtgagaatgctaccagtgaggttttgcgcaatcatgcagccaagaatggcctgggcggcgagaaaagcagagcggggaagttgcagagtaattccgcgcatactaaagatgatcccggcgatcatcggcccaagtaatagcgccgccgggagatgtaccgcgaggaaaccaatagaaaggagaagacttagcacacataacattccccactgcaaaactggcatccttcgctccctcattattttctctttggtgtatcgatacagcataaagaaagctgggccaggaaaaaataacagcaatcaaggaaaaggggaaaatcagcaattttctgaaagagatgccctttccggcggcaaagggcatcatggtaaatcagttatagttaatcttaaaaagcaccactgtatcgaaggggccagcctcgatgggggtgcctggaatggagctaagttcagccgtataggttttttcgtagaccaacatgtcactggtgaaatcggcgtattcagcatatttattgaaggtataagggctggcgttttcatccagtaaacgtagcttcagaccattaccaatcaacaatgctttatcttcttcaaccaacgtttcttcggtataaaaggaggaactgactttaaatccgtcggtgcattgatcgttttggctcttggtcgttttaatactgaacgttttgctcattgtgtggcgacgtatatccagcaaattaaatttaccaaaatcaatcacctgtgtttccggactaatggaaaaattgacgctgcaatccagcacgcgaatgttttccagaccagtaatatgatatttcaggttttgggcagtagggtcttcgttaacgctaccggcaccgtcaaattgcacgacgatatagtcgctaagcgtactttgataatcatgcggcggcatttctcgtattttgacgtataaccgcatgcgagcgagaaaggtacggctcatatgaatattagcgggatcgccgctgcaaattttgttctgccatcccatcgcgatgatctgctcaggggtataaatatcaatgttcttactgtcgatacactggttagtgtcgatgcgactttttcccagactggcatcgtaatcgacaccgttgtatgtcacgccgagttgataataacgatcctgcacccccggataggggtttacccaggcgtagacatgctcgctttcaaagttgccgttggtattgttgtcacaatagacgggaattttaatatcgtcagattcccagatcttatcaccgggtttggcattgcctggtacagcaaacggttgaatcgcttcacttttttctactgcgccaccagatgtaccaaaatagcagttcagcgccattgcagacttcaacggcagaaataacaggcagatgacgagcaacaatcccttgccagcactcatttcgcctccactgcttgtaaacggcattgtccgctgcagttgagcgtcgtcatgcgtaatgcgccgtaatcatccatgtaaccgagataaaactggctgccgctataacttccggtgtttgtgttgaccgtactaaaaggtgcaaccatcacggttttgaagcctgggagaacgcctttttcatttctccccagataggcaatggtcagataatacgcggtaggatttttcagtgtcagttggttgccctgctggctgacctgtaactgcagttcgaccttttctcctgctttcttgcgtaatgcagccggtcgccagaacaatttaatacgactttgaatagcgacctgaagtatcgcatggtcgctgcttttatccggagcgggaggaatttcgcgcatattgtagaaaaatagcgtttcgcgatcgccaggtaattgtgtggtactggcttgtttcacaacccgcacctggcttgtcgctttcggttccagacgttgaatagggggcaaagcgaccagaagagcatcgcttttctcccctttttcattttctatccaggaataagcaagataaggcagtttgtcactttggttttcgatacgcaggctggtggctttgtcattggcgttaaacacaatgcgtgtgcgatcgggttgcaccgcagcattgcaacccaagctgatggttaacaacattaagggtaatcctttaataaatgtcattctcttttccttaattaatgacaaggtaaaatcaggcgtttggtcgtgtcttccagacgttctggcagatgaataatgcagctttgctcaccccagaccacggtaaacagttgattttcagcgacaccgcttaaccaggcatgtccttcctcgccaaccatacccacgctaatgccgctgtcatcctggcggatatccgcaccgaggggagggaactgaccgctggcgttgcgtatgatgacgttaacgtctttaccggaacgggaagccagacttttgtaacctatcgcgccttcaatccatgtttccttgatgacgttttctgcaactgttacgccgtcgggtaagtcattcatgttcaccgccacggtggaaggctggtaactggaaatcaacggcaccaccgcaatgccaaaatggttggtgtagtcgagattgccctgaaccggaatatctgccacgccatcggtgctgaccatcaggcgtggttcattggtggagctgcggcgatgaaatgctgcaccatattgggttgcggtgaaagaaccgctccagctgctgctgacggaactgtaatcactggcggcataggtaccagaaatatcccactcacccgcactactcaggtgctgatagttaccgctcacctgggctccattgtccggacgatcggattgcagtccggcagacatgccccagctattacgttcatccagcgtatcgttccagctcatgcggtgtatggtgctgtggctactgttttgcatgtcatagccaacccgaccaccgttaccgaaggggaggctaatgctcagataaatctggttgtcgcgatctttatcttcgtagtgggtcgtattgaaactcgtgctaatgctgatatctctccagtcaccaatatcaacattaaaacctgctgtgatgttggcggtcgtggaggcgtctgcattccaccaggtttgatgtagcaggttggcgtaaagattgaggtttagtggggtaatcggttggcccacggataagctgatcgtctgtttttcgtcctgcgcatcgctgtcgttgtatttgtgatccagatagttggcgtagctgtgaaaatgacgatcactgaagcgataagcggcgaggctaatcgtgctgttggtggcatccacttgtttgctgtaattaaaacggtagcttaagccccgctcgtcctgctgagtatcaaaatggctactggcccaggtgacatcaaaggacagtgcgccaagccacagcatattttgcccgatacccattgcggcagaatggtagtcatcatcagaaatcagcaggccgccgtacaggctggtgttactgagcatcccccaggaaacttcattgctaaaaaaggtttcattttcagtttgatgactcatggaaggccgtggctgacccgcggccaatttatagcgaacctgtccctggcgagtcaggaagggcgtgcttgctgcgctaacctggaaattgttcacccgaccatcttcttccgtcactttgacatccagcgtgccctgaacagactgattgaggtcatcaataataaacgggcctggcgggacttttttctggtaaatgacgcggccactttgactgatcgtcaccgtggcattggtctgtgcaataccgctaatttgtggggcgtagccacgcagctcccacggtaacattcgatcgtcactcgccagtgccgcgccggtataagaaaaaccatcgaaaatattggaactgaaatcggtttcgccgagggttaacttagagcctaattgcggtaatggacgaaaaagataggtgcggcttattccgccactctggtcatggttatcttcgctatcggtcttattaagctggtaatcactgcgtaagcgccatgccccggcgttaattccggcggtaccgtaggcattcaggttagtgctgctgctgccgtcctgtgggcggtagctgctggcaaacaagttgtaatccatcaggacaccggcaacaccttctttccatgtagaggggggagcccagttttcactgtgccacgccagccaggcttgcggaatactaatattcagttgctgattggcttgatcgaaattgaagagcatttcaggtcgggaactgaaatcaatacaccgatctatctgtggcaaggactgacggacatctggttttaaaccaaatttatcgaccagactatcattgatgcatggaatggttttgtcaccctttttttgccagttaattttttgcccattactgattttgttgttattcaccgcaacgctaacaaaatattcaccgggagcaatgactcctttttcctttaataaactaatatcaatgcggtcgcgcatacttttatcgagaacattcagattgaattcgaccgccattgcgcaaggcatcgccatgaccaggcaggatacaaaagagagtcgataaatattcacggtgtccatacctgataaatattttatgaaaggcggcgatgatgccgccaaaataatacttatttataatccagcacgtaggttgcgttagcggttacttcacctgccgtgacatcgactgcattatcaatttgttccatccaggcgaaaaagttcagcgtctgttcactactgcttgcatccaggtcaagatctggcgcggcactacctaatacgatgttaccgtcatttttgtccatcagtcgtacaccgaccccagttgcttcgcctgcactggtgttgctcaacaaaggcgtagcaccagttgtcttagccgtgctatcgaaggttacgccaactttggataccggcattccgctaccgttgtcagaagcaggcagatcacagttgatcaagcgaatgtcgacggccactttattgctatgatgctcccggtttatatgggttgtcgtgacttgtccaagatctatgtttttatcaatatcttctggatgaatttcacaaggtgcttcaataacctcccccttaaagtgaatttcgccagaaccttcatcagcagcataaacaggtgcagtgaacagcagagatacggccagtgcggccaatgttttttgtcctttaaacataacagagtcctttaaggatatagaataggggtatagctacgccagaatatcgtatttgattattgctagtttttagttttgcttaaaaatattgttagttttattaaatgcaaaactaaattattggtatcatgaatttgttgtatgatgaataaaatataggggggtatagatagacgtcattttcatagggttataaatgcgactaccatgaagtttttaattgaaagtattgggttgctgataatttgagctgttctattctttttaaatatctatataggtctgttaatggattttatttttacaattttttgtgtttaggcatataaaaatcaacccgccatatgaacggcgggttaaaatatttacaacttagcaatcaaccattaacgcttgatatcgcttttaaagtcgcgtttttcatatcctgtatacagctgacgcggacgggcaatcttcataccgtcactgtgcatttcgctccagtgggcgatccagccaacggtacgtgccattgcgaaaatgacggtgaacatggaagacggaatacccatcgctttcaggatgataccagagtagaaatcgacgttcgggtacagtttcttctcgataaagtacgggtcgttcagcgcgatgttttccagctccatagccacttccagcaggtcatccttcgtgcccagctctttcagcacttcatggcaggtttcacgcattacggtggcgcgcgggtcgtaatttttgtacacgcggtgaccgaagcccatcaggcggaaagaatcatttttgtctttcgcacgacgaacaaattccggaatgtgtttaacggagctgatttcttccagcattttcagcgccgcttcgttagcaccgccgtgcgcaggtccccacagactagcaatacctgctgcgatacaggcaaacgggttcgcaccgctagagccagcggtacgcacggtggaggtagaggcgttctgttcatggtcagcgtgcaggatcagaatacggtccatagcacgttccagaatcggattaacttcatacggttcgcacggcgtggagaacatcatattcaggaagttaccggcgtaggagagatcgttgcgcgggtaaacaaatggctgaccaatggaatacttgtaacacatcgcggccatggtcggcattttgctcagcaggcggaacgcggcaatttcacggtgacgaggattgttaacatccaggctgtcgtgatagaacgccgccagcgcgccggtaataccacacatgactgccattggatggctgtcgcgacggaaagcatggaacagacgggtaatctgctcgtggatcatggtatgacgggtcaccgtagttttaaattcgtcatactgttcctgagtcggtttttcaccattcagcaggatgtaacaaacttccaggtagttagaatcggtcgccagctgatcgatcgggaaaccgcggtgcagcaaaataccttcatcaccatcaataaaagtaattttagattcgcaggatgcggtactagtgaagcctgggtcaaaggtgaacacacctttactaccgagagtacggatatcaataacatcttgacccagcgtgcctttcagcacatccagttcaacagctgtatccccgttgagggtgagttttgcttttgtatcagccatttaaggtctccttagcgccttattgcgtaagactgccggaacttaaatttgccttcgcacatcaacctggctttacccgttttttatttggctcgccgctctgtgaaagaggggaaaacctgggtacagagctctgggcgcttgcaggtaaaggatccattgatgacgaataaatggcgaatcaagtacttagcaatccgaattattaaacttgtctaccactaataactgtcccgaatgaattggtcaatacttccacactgttacataagttaatcttaggtgaaataccgacttcataacttttacgcattatatgcttttcctggtaatgtttgtaacaactttgttgaatgattgtcaaattagatgattaaaaattaaataaatgttgttatcgtgacctggatcactgttcaggataaaacccgacaaactatatgtaggttaattgtaatgattttgtgaacagcctatactgccgccaggtctccggaacaccctgcaatcccgagccacccagcgttgtaacgtgtcgttttcgcatctggaagcagtgttttgcatgacgcgcagttatagaaaggacgctgtctgacccgcaagcagaccggaggaaggaaatcccgacgtctccaggtaacagaaagttaacctctgtgcccgtagtccccagggaataataagaacagcatgtgggcgttattcatgataagaaatgtgaaaaaacaaagacctgttaatctggacctacagaccatccggttccccatcacggcgatagcgtccattctccatcgcgtttccggtgtgatcacctttgttgcagtgggcatcctgctgtggcttctgggtaccagcctctcttcccctgaaggtttcgagcaagcttccgcgattatgggcagcttcttcgtcaaatttatcatgtggggcatccttaccgctctggcgtatcacgtcgtcgtaggtattcgccacatgatgatggattttggctatctggaagaaacattcgaagcgggtaaacgctccgccaaaatctcctttgttattactgtcgtgcttagtcttctcgcaggagtcctcgtatggtaagcaacgcctccgcattaggacgcaatggcgtacatgatttcatcctcgttcgcgctaccgctatcgtcctgacgctctacatcatttatatggtcggttttttcgctaccagtggcgagctgacatatgaagtctggatcggtttcttcgcctctgcgttcaccaaagtgttcaccctgctggcgctgttttctatcttgatccatgcctggatcggcatgtggcaggtgttgaccgactacgttaaaccgctggctttgcgcctgatgctgcaactggtgattgtcgttgcactggtggtttacgtgatttatggattcgttgtggtgtggggtgtgtgatgaaattgccagtcagagaatttgatgcagttgtgattggtgccggtggcgcaggtatgcgcgcggcgctgcaaatttcccagagcggccagacctgtgcgctgctctctaaagtcttcccgacccgttcccataccgtttctgcgcaaggcggcattaccgttgcgctgggtaatacccatgaagataactgggaatggcatatgtacgacaccgtgaaagggagcgactatatcggtgaccaggacgcgattgaatatatgtgtaaaaccgggccggaagcgattctggaactcgaacacatgggcctgccgttcagccgtctcgatgatggtcgtatctatcaacgtccgtttggcggtcagagcaaaaacttcggcggcgagcaggcggcacgcactgcggcagcagctgaccgtaccggtcacgcactgttgcacacgctttatcagcagaacctgaaaaaccacaccaccattttctccgagtggtatgcgctggatctggtgaaaaaccaggatggcgcggtggtgggttgtaccgcactgtgcatcgaaaccggtgaagtggtttatttcaaagcccgcgctaccgtgctggcgactggcggagcagggcgtatttatcagtccaccaccaacgcccacattaacaccggcgacggtgtcggcatggctatccgtgccggcgtaccggtgcaggatatggaaatgtggcagttccacccgaccggcattgccggtgcgggcgtactggtcaccgaaggttgccgtggtgaaggcggttatctgctgaacaaacatggcgaacgttttatggagcgttatgcgccgaacgccaaagacctggcgggccgtgacgtggttgcgcgttccatcatgatcgaaatccgtgaaggtcgcggctgtgatggtccgtgggggccacacgcgaaactgaaactcgatcacctgggtaaagaagttctcgaatcccgtctgccgggtatcctggagctttcccgtaccttcgctcacgtcgatccggtgaaagagccgattccggttatcccaacctgtcactacatgatgggcggtattccgaccaaagttaccggtcaggcactgactgtgaatgagaaaggcgaagatgtggttgttccgggactgtttgccgttggtgaaatcgcttgtgtaagcgtacacggcgctaaccgtctgggcggcaacagcctgctggacctggtggtctttggtcgcgcggcaggtctgcatctgcaagagtctatcgccgagcagggcgcactgcgcgatgccagcgagtctgatgttgaagcgtctctggatcgcctgaaccgctggaacaataatcgtaacggtgaagatccggtggcgatccgtaaagcgctgcaagaatgtatgcagcataacttcagcgtcttccgtgaaggtgatgcgatggcgaaagggcttgagcagttgaaagtgatccgcgagcgtctgaaaaatgcccgtctggatgacacttccagcgagttcaacacccagcgcgttgagtgcctggaactggataacctgatggaaacggcgtatgcaacggctgtttctgccaacttccgtaccgaaagccgtggcgcgcatagccgcttcgacttcccggatcgtgatgatgaaaactggctgtgccactccctgtatctgccagagagcgaatccatgacgcgccgaagcgtcaacatggaaccgaaactgcgcccggcattcccgccgaagattcgtacttactaatgcggagacaggaaaatgagactcgagtttagtatttatcgctataacccggatgttgatgatgctccgcgtatgcaggattacaccctggaagcggatgaaggtcgcgacatgatgctgctggatgcgcttatccagctaaaagagaaagatcccagcctgagcttccgccgctcctgccgtgaaggtgtgtgcggttccgacggtctgaacatgaacggcaagaatggtctggcctgtattaccccgattagcgcactcaaccagccgggcaagaagattgtgattcgcccgctgccaggtttaccggtgatccgcgatttggtggtagacatgggacaattctatgcgcaatatgagaaaattaagccttacctgttgaataatggacaaaatccgccagctcgcgagcatttacagatgccagagcagcgcgaaaaactcgacgggctgtatgaatgtattctctgcgcatgttgtagtacctcttgtccgtctttctggtggaatcccgataagtttatcggcccggcaggcttgttagcggcatatcgtttcctgattgatagccgtgataccgagactgacagccgcctcgacggtttgagtgatgcattcagcgtattccgctgtcacagcatcatgaactgcgtcagtgtatgtccgaaggggctgaacccgacgcgcgccatcggccatatcaagagcatgttgttgcaacgtaatgcgtaaaccgtaggcctgataagacgcgcaagcgtcgcatcaggcaaccagtgccggatgcggcgtgaacgccttatccggcctacaagtcattacccgtaggcctgataagcgcagcgcatcaggcgtaacaaagaaatgcaggaaatctttaaaaactgcccctgacactaagacagtttttaaaggttccttcgcgagccactacgtagacaagagctcgcaagtgaaccccggcacgcacatcactgtgcgtggtagtatccacggcgaagtaagcataaaaaagatgcttaagggatcacgatgcagaacagcgctttgaaagcctggttggactcttcttacctctctggcgcaaaccagagctggatagaacagctctatgaagacttcttaaccgatcctgacagcgttgacgctaactggcgtaacacgttccagcagttacctggtacgggagtcaaaccggatcaattccactctcaaacgcgtgaatatttccgccgcctggcgaaagacgctagtcgttactctagtacgatctccgaccctgacaccaatgtgaagcaggttaaagtcctgcagctcattaacgcataccgcttccgtggtcaccagcatgcgaatctcgatccgctgggactgtggcagcaagataaagtggccgatctggatccgtctttccacgatctgaccgaagcagacttccaggagaccttcaacgtcggtagttttgccagcggcaaagaaaccatgaaactcggcgagctgctggaagccctcaagcaaacctactgcggcccgattggtgccgagtatatgcacattaccagcaccgaagaaaaacgctggatccaacagcgtatcgagtctggtcgcgcgactttcaatagcgaagagaaaaaacgcttcttaagcgaactgaccgccgctgaaggtcttgaacgttacctcggcgcaaaattccctggcgcaaaacgcttcagcctggaaggcggtgacgcgttaatcccgatgcttaaagagatgatccgccacgctggcaacagcggcacccgcgaagtggttctcgggatggcgcaccgtggtcgtctgaacgtgctggtgaacgtgctgggtaaaaaaccgcaagacttgttcgacgagttcgccggtaaacataaagaacacctcggcacgggtgacgtgaaataccacatgggcttcagctctgacttccagaccgatggcggcctggtgcacctggcgctggcgtttaacccgtctcaccttgagattgtaagcccggtagttatcggttctgttcgtgcccgtctggacagacttgatgagccgagcagcaacaaagtgctgccaatcaccatccacggtgacgccgcagtgaccgggcagggcgtggttcaggaaaccctgaacatgagcaaagcgcgtggttatgaagttggcggtacggtacgtatcgttatcaacaaccaggttggtttcaccacctctaatccgctggatgcccgttctacgccgtactgtactgatatcggtaagatggttcaggccccgattttccacgttaacgcggacgatccggaagccgttgcctttgtgacccgtctggcgctcgatttccgtaacacctttaaacgtgatgtcttcatcgacctggtgtgctaccgccgtcacggccacaacgaagccgacgagccgagcgcaacccagccgctgatgtatcagaaaatcaaaaaacatccgacaccgcgcaaaatctacgctgacaagctggagcaggaaaaagtggcgacgctggaagatgccaccgagatggttaacctgtaccgcgatgcgctggatgctggcgattgcgtagtggcagagtggcgtccgatgaacatgcactctttcacctggagcccgtacctcaaccacgaatgggacgaagagtacccgaacaaagttgagatgaagcgcctgcaggagctggcgaaacgcatcagcacggtgccggaagcagttgaaatgcagtctcgcgttgccaagatttatggcgatcgccaggcgatggctgccggtgagaaactgttcgactggggcggtgcggaaaacctcgcttacgccacgctggttgatgaaggcattccggttcgcctgagcggtgaagactccggtcgcggtaccttcttccaccgccacgcggtgatccacaaccagtctaacggttccacttacacgccgctgcaacatatccataacgggcagggcgcgttccgtgtctgggactccgtactgtctgaagaagcagtgctggcgtttgaatatggttatgccaccgcagaaccacgcactctgaccatctgggaagcgcagttcggtgacttcgccaacggtgcgcaggtggttatcgaccagttcatctcctctggcgaacagaaatggggccggatgtgtggtctggtgatgttgctgccgcacggttacgaagggcaggggccggagcactcctccgcgcgtctggaacgttatctgcaactttgtgctgagcaaaacatgcaggtttgcgtaccgtctaccccggcacaggtttaccacatgctgcgtcgtcaggcgctgcgcgggatgcgtcgtccgctggtcgtgatgagcccgaaatccctgctgcgtcatccgctggcggtttccagcctcgaagaactggcgaacggcaccttcctgccagccatcggtgaaatcgacgagcttgatccgaagggcgtgaagcgcgtagtgatgtgttctggtaaggtttattacgacctgctggaacagcgtcgtaagaacaatcaacacgatgtcgccattgtgcgtatcgagcaactctacccgttcccgcataaagcgatgcaggaagtgttgcagcagtttgctcacgtcaaggattttgtctggtgccaggaagagccgctcaaccagggcgcatggtactgcagccagcatcatttccgtgaagtgattccgtttggggcttctctgcgttatgcaggccgcccggcctccgcctctccggcggtagggtatatgtccgttcaccagaaacagcaacaagatctggttaatgacgcgctgaacgtcgaataaataaaggatacacaatgagtagcgtagatattctggtccctgacctgcctgaatccgtagccgatgccaccgtcgcaacctggcataaaaaacccggcgacgcagtcgtacgtgatgaagtgctggtagaaatcgaaactgacaaagtggtactggaagtaccggcaagtgcagacggcattctggatgcggttctggaagatgaaggtacaacggtaacgtctcgtcagatccttggtcgcctgcgtgaaggcaacagcgccggtaaagaaaccagcgccaaatctgaagagaaagcgtccactccggcgcaacgccagcaggcgtctctggaagagcaaaacaacgatgcgttaagcccggcgatccgtcgcctgctggctgaacacaatctcgacgccagcgccattaaaggcaccggtgtgggtggtcgtctgactcgtgaagatgtggaaaaacatctggcgaaagccccggcgaaagagtctgctccggcagcggctgctccggcggcgcaaccggctctggctgcacgtagtgaaaaacgtgtcccgatgactcgcctgcgtaagcgtgtggcagagcgtctgctggaagcgaaaaactccaccgccatgctgaccacgttcaacgaagtcaacatgaagccgattatggatctgcgtaagcagtacggtgaagcgtttgaaaaacgccacggcatccgtctgggctttatgtccttctacgtgaaagcggtggttgaagccctgaaacgttacccggaagtgaacgcttctatcgacggcgatgacgtggtttaccacaactatttcgacgtcagcatggcggtttctacgccgcgcggcctggtgacgccggttctgcgtgatgtcgataccctcggcatggcagacatcgagaagaaaatcaaagagctggcagtcaaaggccgtgacggcaagctgaccgttgaagatctgaccggtggtaacttcaccatcaccaacggtggtgtgttcggttccctgatgtctacgccgatcatcaacccgccgcagagcgcaattctgggtatgcacgctatcaaagatcgtccgatggcggtgaatggtcaggttgagatcctgccgatgatgtacctggcgctgtcctacgatcaccgtctgatcgatggtcgcgaatccgtgggcttcctggtaacgatcaaagagttgctggaagatccgacgcgtctgctgctggacgtgtaatagtttaagtttcacctgcactgtagaccggataaggcattatcgccttctccggcaattgaagcctgatgcgacgctgacgcgtcttatcaggcctacgggaccaccaatgtaggtcggataaggcgcaagcgccgcatccgacaagcgatgcctgatgtgacgtttaacgtgtcttatcaggcctacgggtgaccgacaatgcccggaagcgatacgaaatattcggtctacggtttaaaagataacgattactgaaggatggacagaacacatgaacttacatgaatatcaggcaaaacaactttttgcccgctatggcttaccagcaccggtgggttatgcctgtactactccgcgcgaagcagaagaagccgctagtaaaatcggtgccggtccgtgggtagtgaaatgtcaggttcacgctggtggccgcggtaaagcgggcggtgtgaaagttgtaaacagcaaagaagacatccgtgcttttgcagaaaactggctgggcaagcgtctggtaacgtatcaaacagatgccaatggccaaccggttaaccagattctggttgaagcagcgaccgatatcgctaaagagctgtatctcggtgccgttgttgaccgtagttcccgtcgtgtggtctttatggcctccaccgaaggcggcgtggaaatcgaaaaagtggcggaagaaactccgcacctgatccataaagttgcgcttgatccgctgactggcccgatgccgtatcagggacgcgagctggcgttcaaactgggtctggaaggtaaactggttcagcagttcaccaaaatcttcatgggcctggcgaccattttcctggagcgcgacctggcgttgatcgaaatcaacccgctggtcatcaccaaacagggcgatctgatttgcctcgacggcaaactgggcgctgacggcaacgcactgttccgccagcctgatctgcgcgaaatgcgtgaccagagccaggaagatccgcgtgaagcacaggctgcacagtgggaactgaactacgttgcgctggacggtaacatcggttgtatggttaacggcgcaggtctggcgatgggtacgatggacatcgttaaactgcacggcggcgaaccggctaacttccttgacgttggcggcggcgcaaccaaagaacgtgtaaccgaagcgttcaaaatcatcctctctgacgacaaagtgaaagccgttctggttaacatcttcggcggtatcgttcgttgcgacctgatcgctgacggtatcatcggcgcggtagcagaagtgggtgttaacgtaccggtcgtggtacgtctggaaggtaacaacgccgaactcggcgcgaagaaactggctgacagcggcctgaatattattgcagcaaaaggtctgacggatgcagctcagcaggttgttgccgcagtggaggggaaataatgtccattttaatcgataaaaacaccaaggttatctgccagggctttaccggtagccaggggactttccacagtgaacaggccattgcatacggcactaaaatggttggcggcgtaaccccaggtaaaggcggcaccacccacctcggcctgccggtgttcaacaccgtgcgtgaagccgttgctgccactggcgctaccgcttctgttatctacgtaccagcaccgttctgcaaagactccattctggaagccatcgacgcaggcatcaaactgattatcaccatcactgaaggcatcccgacgctggatatgctgaccgtgaaagtgaagctggatgaagcaggcgttcgtatgatcggcccgaactgcccaggcgttatcactccgggtgaatgcaaaatcggtatccagcctggtcacattcacaaaccgggtaaagtgggtatcgtttcccgttccggtacactgacctatgaagcggttaaacagaccacggattacggtttcggtcagagcacctgtgtcggtatcggcggtgacccgatcccgggctctaactttatcgacattctcgaaatgttcgaaaaagatccgcagaccgaagcgatcgtgatgatcggtgagatcggcggtagcgctgaagaagaagcagctgcgtacatcaaagagcacgttaccaagccagttgtgggttacatcgctggtgtgactgcgccgaaaggcaaacgtatgggccacgcgggtgccatcattgccggtgggaaagggactgcggatgagaaattcgctgctctggaagccgcaggcgtgaaaaccgttcgcagcctggcggatatcggtgaagcactgaaaactgttctgaaataaatatctgtaataagaaatagccctcgccgcttccctctacaggaatggcgaagggctgtcggtttcgacatggttggccatcgtatgatggccttttttgtgcttatcggctactttttcgctgcgctatcagggtaaatttatagtcatcggtattaaaagcgttgcggctatattcaaacacccgaccatcaactaaatatccacggcttactttttcaagaatcggctttgtctggctgatattaagcagacggctcatctcttcggttggcatcagaggaatgatttcctgttcgctacgatcgataaccattttcttcacttcttcgataaagtgatatttgctattttccatgacctgccaggtgagatccgggaacaacgcaagcggcatccaggtttcttccagcgccattggcttttgcttgcgatagcgcacgcgcttcacatgccacacacgatcctgcggggtgatttgtagctgttgctgaagaaaatcgtcagccggaatcacttcgaatatcagaacttcactgtgtgtatcgacgtgacggtcgctcagtttttcatcaaaactggttaactgaaaaatatcgtaattgacccgctcttctttgacgtaagtcccgctgccctgaatgctttcgaggatctgctgctcgactagctggcgcaaagcctgacgcaccgtaacccggctgacgccaaactctgtttgtagcgcactttcagtgggtaacgcatcgccaggtttaagctcgccacgcgcaatttgttcacgaatgcgatcggcaatctgccggtataagggcttgtgtcccatttttagtatctcattaatacgaatttaaccattatgcccgataaattcatcctgtaaataatacaaatacaatacaaataatttcaatcaagtgaaattgatcacataatggtattgttttatcgggcacactggcgcgactataaaaacgatcaagtgaggatcatgatgaatctgacgactctgacccaccgcgatgcgttgtgtctgaatgcgcgctttaccagccgtgaagaggccatccacgcgttgactcaacgtcttgctgctctggggaaaatttccagtactgagcaatttctggaagaagtgtatcgccgtgaaagccttggcccgaccgccttaggtgaagggttggctgtgccgcatggcaaaactgctgcggtaaaagaagcggcgtttgcggtcgccacactcagcgagccgcttcagtgggaaggcgttgatggcccggaagcagttgatttagtggtgctgctggcgattccccccaatgaagcgggtactacgcatatgcaactgctgacagcgctgaccacgcgccttgcggatgatgagattcgggcgcgtatacagagcgcgacgacgcctgatgagttgctcagcgcgctggatgacaagggaggcacgcaaccttctgcctctttttccaacgcgccaactatcgtctgcgtaacggcctgtccggcgggtattgctcacacctatatggctgcggaatatctggaaaaagccggacgcaaactcggcgtaaatgtttacgttgaaaaacaaggcgctaacggcattgaagggcgtttaacggcggatcaactcaatagtgcaaccgcctgtatttttgcggctgaagtcgccatcaaggagagtgagcgttttaatggcattcccgcgcttagtgtgcctgttgccgagccgattcgccatgcagaagcgttgatccaacaagcgcttaccctcaagcgtagcgatgagacgcgtaccgtacagcaagatacgcaaccggtgaaaagtgtcaaaacggagctgaaacaggcactgttgagcggaatctcttttgccgtaccgttgattgtcgcggggggcacggtgctggcggtcgcggtattactgagccaaatcttcgggctacaagatctgtttaatgaagaaaactcctggctgtggatgtaccgcaagctgggcggcgggctgctcggaattttgatggtaccggtgctcgcggcctataccgcctattctctggcagataaaccggcgttagcgccaggctttgcggctggacttgccgccaacatgatcggctccgggtttctcggcgcggtcgttggcggattgatagccggttacttgatgcgctgggtgaaaaatcacttgcgtcttagcagtaaattcaatggattcctgactttttatctctacccggtgctcggtacgttgggagcgggcagtctgatgctgtttgtggtgggggaacctgtcgcctggatcaataacagccttaccgcctggctgaacggtctgagtggaagtaacgcgctgttgctgggtgccattctcggttttatgtgttcctttgaccttggagggccagtgaataaagccgcttatgcattctgcctgggcgcaatggcgaacggcgtttacggcccgtatgccattttcgcctccgtcaaaatggttagcgcatttaccgtaaccgcttccacgatgctcgcaccgcgcctgtttaaagagtttgaaattgagaccgggaaatccacctggctgttagggctggcaggtattaccgaaggggcgatcccgatggcgattgaagatccgctgcgggttattggtagctttgtgctgggctctatggtaacgggcgctattgtcggtgcgatgaatatcggccttagcacacccggtgccggcattttcagcctctttttacttcatgataatggcgcgggcggtgttatggcggcaattggctggtttggcgcggcattggtgggggctgcaatcagcactgcaattctcctgatgtggcggcgtcacgcggttaagcatggcaactatctgactgatggcgtaatgccataaacaaaaaggaaacgacgatgaaagcagtatctcgcgttcacatcaccccgcatatgcactgggatcgagagtggtatttcaccaccgaagagagtcgtattctgctggtcaataatatggaagagatcctgtgccgactggaacaggacaacgaatacaaatattacgtactcgacgggcaaacggcgatcctcgaagattatttcgcggtgaaaccggaaaacaaagaccgtgtgaagaaacaggtagaagccggcaagttgattatcggcccctggtatacccagaccgataccacgattgtttctgcggaatccatcgtccgtaatctgatgtacggaatgcgtgactgcctcgcgtttggcgagccgatgaaaataggttatttaccagattcctttggcatgtccgggcaactgccgcatatctacaatggatttggcattacccgcaccatgttctggcgcggatgtagcgagcgccacggtactgataaaaccgagtttttgtggcaaagcagtgacggtagcgaagtgacggcgcaggtgctgccgctgggctacgccatcggtaagtacttacctgccgacgaaaacggattacgtaaacgcctcgacagttattttgacgtgctggaaaaagcgtctgtaaccaaagagattttgctgccgaatgggcatgaccagatgccattgcagcaaaatatcttcgaagtgatggataagctacgtgagatctaccctcaacgtaagtttgtgatgagccgctttgaagaggtatttgagaagatcgaagcgcagcgagataatctggcaaccctgaaaggggaatttattgatggcaaatatatgcgcgtgcatcgcaccatcggttctacgcgtatggatatcaaaattgcccacgcgcgtattgaaaataagattgttaatctgctggaaccgctggcaacactggcctggacgttgggttttgaataccaccacggcttgctggagaaaatgtggaaagagatcttaaaaaatcatgcccacgacagtatcggctgctgctgtagtgacaaagttcatcgcgaaatcgtcgcccgcttcgaactggctgaagacatggcggataatctgattcgtttctacatgcgcaaaattgccgacaacatgccgcagagcgacgccgacaaactcgtcctgtttaacctgatgccctggccgcgtgaagaagttatcaacaccactgtgcggctgcgcgccagccagtttaatttgcgggacgatcgcggtcagcctgtaccgtattttattcgccatgcccgtgagatcgatccaggcctaatcgatcggcaaatagttcattacggtaattacgatccctttatggagtttgatatacagatcaaccagattgtcccttctatgggctatcgcacgctttatatcgaagcgaatcagcctggcaacgtaattgcggcaaaaagtgacgctgaagggatactggaaaatgctttctggcaaattgcgctcaatgaggatggttctctgcaactggtagataaagacagcggtgtgcgctatgaccgggtattgcaaattgaagaaagctctgatgatggtgatgaatatgactatagtcccgcaaaagaagagtgggtaattaccgcagcgaacgcgaaaccgcaatgcgatattattcatgaagcctggcagagcagggctgttatccgctatgacatggcagtgccgctcaatttgagtgaacgcagcgcccggcaatccactggcagagtaggggtggtgttggttgtcactcttagtcataacagcaggcgtattgatgtggatatcaatcttgataaccaggctgacgatcatcgccttcgtgtcctggtccctacaccttttaacaccgacagtgttctggcagatacgcagtttggtagcctaacgcgccccgtgaacgacagtgcaatgaacaactggcagcaagaaggctggaaagaagcgccggttccggtatggaatatgctcaactatgttgccttacaggaagggcgtaacggcatggctgtctttagcgaagggttacgtgaatttgaagtcatcggtgaagagaagaaaacctttgccattacgttgctgcgtggcgtgggcttactgggcaaagaagatctgcttttaaggcctgggcggcctagcggaattaaaatgccagtcccggacagtcaactacgtggtctgctttcttgtcgcctaagtttattgagttataccggtacgccaaccgccgctggtgtagctcagcaggcgcgagcatggctgactccagtacagtgttacaacaaaatcccatgggatgtgatgaagctcaacaaagccggattcaacgtgccggaaagttatagtttgttgaaaatgcccccagtgggatgcctgataagcgcacttaagaaagctgaagaccgacaagaagtgattttacggctgtttaatccggctgaaagtgcaacctgtgatgcgactgttgctttcagtcgcgaggtgatttcttgcagtgaaacgatgatggatgaacacattaccaccgaggaaaatcaaggtagtaatctaagcgggccttttttacccggccagagtcggacgttcagttaccggcttgcctgaatagcaatcaaaccgaagccacatatgcgcggccagattgttgacaaagggcgctttgttcatgccggatacggcatgaacgctttattcggtctacaaaagcaggcaaattcaatatattgcagagatgatgtagacactggcaagcgtagcgcatcaggtaattttgcgtttatcttcactctcaagccacgtatatgtggctttatttttaacaaaataataaccctgggtgagttaattataatataattataagttaactaaatgttaatattggcggggtggatttatgcctttattagtaatcctgaaactctgcgtcgtattagccagtgaccaaaaaaagaattaaggtcaaccgtgctgtttttgcttcgtctctttttatctttaattgccaaccgaaactaatttcagccttataactcacacattttaaacataaatgtcactaaagttaccttattgaaacatgattaacataatttgtaggaattgatatttatcaatgtataagtcttggaaatgggcatcaaaaagagataaattgttctcgatcaaattggctgaaaggcggtaatttagctataaattgatcaccgtcgaaaaatgcaaatttgcttcaacaaaaacctgtttattgtaaggattttgcggcgtaatatatacgtgggatcaatttgagtttttattaacatgtttgcaacctttctttacgccgtttttgtgtgcattcacatggtatgatgaaagtgttcaaacaaatttctattggggcatgcgtgtgaccctttctaacggggttcactctcggagtcttcatgcgatgagcaaggagtcatgatgttagatatagtcgaactgagccgcttacagtttgccttgaccgcgatgtaccacttcctttttgtgccactgacgctcggtatggcgttcctgctggccattatggaaacggtctacgtcctctccggcaaacagatttataaagatatgaccaagttctggggcaagttgtttggtatcaacttcgctctgggtgtggctaccggtctgaccatggagttccagttcgggactaactggtcttactattcccactatgtaggggatatcttcggtgcgccgctggcaatcgaaggtctgatggccttcttcctcgaatccacctttgtaggtctgttcttcttcggttgggatcgtctgggtaaagttcagcatatgtgtgtcacctggctggtggcgctcggtagtaacctgtccgcactgtggattctggttgcgaacggctggatgcaaaacccaatcgcgtccgatttcaactttgaaactatgcgtatggagatggtgagcttctccgagctggtgcttaacccggttgctcaggtgaaattcgttcacactgtagcgtctggttatgtgactggcgcgatgttcatcctcggtatcagcgcatggtatatgctgaaaggtcgtgacttcgccttcgctaaacgctcctttgctatcgctgccagcttcggtatggctgctgttctgtctgttattgttctgggtgatgaatccggctacgaaatgggcgacgtgcagaaaaccaaactggctgctattgaagccgagtgggaaacgcaacctgcgcctgctgcctttactctgttcggcattcctgatcaggaagaggagacgaacaaatttgcgattcagatcccttacgcactgggcatcattgcaacgcgttccgtggataccccggttatcggcctgaaagagctgatggtgcagcatgaagaacgcattcgtaacgggatgaaggcgtactctctgctcgaacaactgcgttctggttctaccgaccaggcggttcgtgaccagttcaatagcatgaagaaagacctcggttacggtctgctgctgaaacgctatacgccaaacgtggctgatgcgactgaagcgcagattcaacaggcaaccaaagactccatcccgcgtgtagcgccgctgtactttgcgttccgtatcatggtggcgtgtggcttcctgcttctggcaatcatcgcgctctctttctggagtgtcatccgcaaccgcattggcgagaaaaaatggcttctgcgcgccgcgctgtacggtattccgctgccgtggattgctgtagaagcgggctggttcgtggctgaatatggccgccaaccgtgggctatcggtgaagtgctgccgacagctgtggcgaacagcagtctgaccgcaggcgatctcatcttcagtatggtgctgatttgcggcctgtataccctgttcctggtggcagaattgttcttaatgttcaagtttgcacgcctcggcccaagcagcctgaaaaccggtcgctatcactttgagcagtcttccacgactactcagccggcacgctaagacaggagtcgtcaaatgatcgattatgaagtattgcgttttatctggtggctgctggttggcgttctgctgattggttttgcagtcactgacggtttcgacatgggggtgggcatgctcacccgtttcctcggtcgtaacgacaccgagcgtcgaattatgattaactccattgcaccacactgggacggtaaccaggtttggctgatcaccgcgggcggcgcactctttgctgcctggccgatggtctatgccgctgcgttctccggcttctatgtggcgatgatcctcgtgctggcgtctttgttcttccgtccggtcggttttgactaccgctccaagattgaagaaacccgctggcgtaacatgtgggactggggcatcttcattggtagcttcgttccgccgctggtaattggtgtagcgttcggtaacctgttgcagggcgtaccgttcaacgttgatgaatatctgcgtctgtactacaccggtaacttcttccagttgcttaacccgttcggcctgctggcaggcgtggtgagcgtagggatgatcattactcagggcgcaacctatctgcaaatgcgtaccgtgggcgaactgcacctgcgtacccgtgcaacggctcaggtggctgcgctggtgacactggtctgtttcgcactggctggcgtatgggtgatgtacggtatcgatggttatgtcgtgaaaagcacaatggaccattacgcagcctctaacccactgaataaagaagtggttcgtgaagctggcgcatggctggttaacttcaacaacacgccaattctgtgggctattccggcactgggtgtggttctgccgctgctgaccatcctgactgcacgtatggataaagccgcgtgggcgtttgtgttctcctccctgacgctggcctgcatcatcctgacagccggtatcgcaatgttcccgtttgtgatgccgtccagcaccatgatgaacgcaagtctgacaatgtgggatgcaacttccagccagctgacgcttaacgtcatgacctgggttgcggtggttctggtaccgatcattctgctctacaccgcctggtgttactggaaaatgttcggtcgtatcaccaaagaagatattgaacgtaacacccactctctgtactaagtaaggagctaaaaatgtggtatttcgcatggattctgggaacgcttcttgcctgtagctttggggtaatcaccgcgctggcgcttgaacacgtcgaaagtggcaaagccggtcaagaagacatctgatgagtaagattatcgcgactttgtatgcggtaatggacaagcgccccctgcgggcgctttccttcgtgatggcgcttctgttagcaggatgtatgttttgggacccatctcgttttgccgcgaagaccagtgaactggaaatctggcatggtttattgctgatgtgggccgtctgtgctggtgtgattcacggcgtgggctttcgtccgcagaaggttctttggcaagggattttttgcccattgcttgccgatattgttctcattgtcgggctgattttcttcttcttttaaatcagaattctctttaaaaaattatgggccgctccaggcccataaatttttacgctcccttaacttgccctcattcccaaacctcaatcgcgcgcgtatagtagcagcgtttaaaagctctaacttttgttgcattaccgggatgtaaagtgaatacaacgctgtttcgatggccggttcgcgtctactatgaagataccgatgccggtggtgtggtgtaccacgccagttacgtcgctttttatgaaagagcacgcacagagatgctgcgtcatcatcacttcagtcagcaggcgctgatggctgaacgcgttgcctttgtggtacgtaaaatgacggtggaatattacgcacctgcgcggctcgacgatatgctcgaaatacagactgaaataacaagtatgcgtggcacctctttggttttcacgcaacgtattgtcaacgccgagaatactttgctgaatgaagcagaggttctggttgtttgcgttgacccactcaaaatgaagcctcgtgcgcttcccaagtctattgtcgcggagtttaagcagtgactgacatgaatatccttgatttgttcctgaaggctagccttctggttaaacttatcatgttgattttgattggttttagtatcgcatcttgggccattattatccagcggacccgtattcttaacgcagcggcgcgcgaagccgaagcgtttgaagataaattctggtctggaatcgaactctctcgcctctatcaagagagccaggggaaacgggataatctgactggtagcgaacaaatcttttacagcgggttcaaagagtttgtgcgcctgcatcgtgccaatagccatgcgccggaagccgtagtggaaggggcgagccgtgctatgcgtatctccatgaaccgtgaacttgaaaatctggaaacgcacattccgttcctcggtacggttggctccatcagcccgtatattggtctgtttggtacggtctgggggatcatgcacgcctttatcgccctcggggcggtaaaacaagcaacactgcaaatggttgcgcccggtatcgcagaagcgttgattgcgactgcaattggtctgtttgccgctatcccggcagttatggcctacaaccgcctcaaccagcgcgtaaacaaactggaactgaattacgacaactttatggaagagtttaccgcgattctgcaccgccaggcgtttaccgttagcgagagcaacaaggggtaagccatggccagagcgcgtggacgaggtcgtcgcgatctcaagtccgaaatcaacattgtaccgttgctggacgtactgctggtgctgttgctgatctttatggcgacagcgcccatcatcacccagagcgtggaggtcgatctgccagacgctactgaaagtcaggcggtgagcagtaacgataatccgccagtgattgttgaagtgtctggtattggtcagtacaccgtggtggttgagaaagatcgcctggagcgtttaccaccagagcaggtggtggcggaagtgtccagccgtttcaaggccaacccgaaaacggtctttctgatcggtggcgcaaaagatgtgccttacgatgaaataattaaagcactgaacttgttacatagtgcgggtgtgaaaagcgttggtttaatgacgcagcctatctaaacatctgcgtttcccttgcttgaaagagagcgggtaacaggcgaacagtttttggaaaccgagagtgagtaaggcaaccgaacaaaacgacaagctcaagcgggcgataattattagtgcagtgctgcatgtcatcttatttgcggcgctgatctggagtagcttcgatgagaatatagaagctagtgccggaggcggcggtggtagctccatcgacgctgtcttggttgatagtggtgcggtagttgagcagtacaaacgcatgcaaagccaggaaagtagcgcgaagcgttctgatgaacagcgcaagatgaaggaacagcaggctgctgaagaactgcgtgagaaacaagcggctgaacaggaacgcctgaagcaacttgagaaagagcggttagcggctcaggagcagaaaaagcaggctgaagaagccgcaaaacaggccgagttaaagcagaagcaagctgaagaggcggcagcgaaagcggcggcagatgctaaagcgaaggccgaagcagatgctaaagctgcggaagaagcagcgaagaaagcggctgcagacgcaaagaaaaaagcagaagcagaagccgccaaagccgcagccgaagcgcagaaaaaagccgaggcagccgctgcggcactgaagaagaaagcggaagcggcagaagcagctgcagctgaagcaagaaagaaagcggcaactgaagctgctgaaaaagccaaagcagaagctgagaagaaagcggctgctgaaaaggctgcagctgataagaaagcggcagcagagaaagctgcagccgacaaaaaagcagcagaaaaagcggctgctgaaaaggcagcagctgataagaaagcagcggcagaaaaagccgccgcagacaaaaaagcggcagcggcaaaagctgcagctgaaaaagccgctgcagcaaaagcggccgcagaggcagatgatattttcggtgagctaagctctggtaagaatgcaccgaaaacggggggaggggcgaaagggaacaatgctagccctgccgggagtggtaatactaaaaacaatggcgcaagtggggccgatatcaataactatgccgggcagattaaatctgctatcgaaagtaagttctatgacgcaagctcctatgcaggcaaaacctgtacgctgcgcataaaactggcacccgatggtatgttactggatatcaaacctgaaggtggcgatcccgcactttgtcaggctgcgttggcagcagctaaacttgcgaagatcccgaaaccaccaagccaggcagtatatgaagtgttcaaaaacgcgccattggacttcaaaccgtaatcgcgatgttgactgttcggacggtcaacatcaggcaccggttgccacggggttctggtagttttgtgtattttagtttgttaacattctgctaaattatcgtgggccatcggtccagataagggagatatgatgaagcaggcattacgagtagcatttggttttctcatactgtgggcaagtgttctgcatgctgaagtccgcattgtgatcgacagcggtgtagattccggtcgtcctattggtgttgttcctttccagtgggcggggcctggtgcggcacctgaagatattggcggcatcgttgctgctgacttgcgtaacagcggtaaatttaatccgttagatcgcgctcgtctgccacagcagccgggtagtgcgcaggaagtacaaccagctgcatggtccgcactgggcattgacgctgtagttgtcggtcaggtcactccgaatccggatggttcttacaatgttgcttatcaacttgttgacactggcggcgcaccgggtactgtacttgctcagaacagctacaaagtgaacaagcagtggctgcgttatgctggtcataccgccagtgatgaagtgtttgaaaaactgaccggcattaaaggtgcgttccgtactcgtattgcctacgttgttcagaccaacggcggtcagttcccgtatgaactgcgcgtatctgactatgacggttacaaccagtttgtcgttcaccgtagtccgcagccgctgatgtctccggcgtggagtccagacggttctaaactggcttatgtgaccttcgaaagcggtcgttccgcgctggttattcagacgctggcaaatggcgctgtacgtcaggtggctagtttcccgcgtcacaacggtgcacctgcattcagcccagacggcagcaaactggcattcgccttgagcaaaaccggtagtctgaacctgtacgtaatggatttggcttctggtcagatccgccaggtgactgatggtcgcagtaacaataccgaaccgacctggttcccggatagccagaacctggcatttacttctgaccaggccggtcgtccgcaggtttataaagtgaatatcaacggcggtgcgccacaacgtattacctgggaaggtagccagaaccaggatgcggatgtcagcagcgacggtaaatttatggtaatggtcagctccaatggtgggcagcagcacattgccaaacaagatctggcaacgggaggcgtacaagttctgagctccacgttcctggatgaaacgccaagtctggcacctaacggcactatggtaatctacagctcttctcaggggatgggatccgtgctgaatttggtttctacagatgggcgtttcaaagcgcgtcttccggcaactgatggacaggtcaaattccctgcctggagcccgtatctgtgataataattaattgaatagtaaaggaatcattgaaatgcaactgaacaaagtgctgaaagggctgatgattgctctgcctgttatggcaattgcggcatgttcttccaacaagaacgccagcaatgacggcagcgaaggcatgctgggtgccggcactggtatggatgcgaacggcggcaacggcaacatgtcttccgaagagcaggctcgtctgcaaatgcaacagctgcagcagaacaacatcgtttacttcgatctggacaagtacgatatccgttctgacttcgctcaaatgctggatgcacatgcaaacttcctgcgtagcaacccgtcttacaaagtcaccgtagaaggtcacgcggacgaacgtggtactccggaatacaacatctccctgggtgaacgtcgtgcgaacgccgttaagatgtacctgcagggtaaaggcgtttctgcagaccagatctccatcgtttcttacggtaaagaaaaacctgcagtactgggtcatgacgaagcggcatactccaaaaaccgtcgtgcggtactggtttactaagagaattgcatgagcagtaacttcagacatcaactattgagtctgagcttactggttggtatagcggccccctgggccgcttttgctcaggcaccaatcagtagtgtcggcagtggcagcgtcgaagaccgcgtcactcaacttgagcgtatttctaatgctcacagccagcttttaacccaactccagcaacaactttctgataatcaatccgatattgattccctgcgtggtcagattcaggaaaatcagtatcaactgaatcaggtcgtggagcggcaaaagcagatcctgttgcagatcgacagcctcagcagcggtggtgcagcggcgcaaagtaccagcggcgatcaaagcggtgcggcggcaagtacgacgccgacagctgatgctggtactgcgaatgctggcgcgccggtgaaaagcggtaatgcaaacacggattacaatgcagctattgcgctggtgcaggataaatcccgccaggatgacgcaatggtggcatttcagaatttcatcaaaaattaccctgatagtacttacctgccaaacgccaattattggctgggtcagttaaactacaacaagggtaaaaaagatgatgcggcgtactattttgctagcgtagtgaaaaactatccgaagagtccaaaggctgcagatgcgatgtttaaagtcggcgtcatcatgcaggacaaaggtgacaccgcaaaagcgaaagccgtataccagcaggttatcagtaaataccctggtactgatggcgctaaacaggcacaaaaacgtctgaacgcgatgtaatgcataacacacgaccagaagtcgcattatttctggtcgtgtcgtgcgaatcataagcagttgagtgatctacatcgaaatttttgttgcgctcaagtctgaaatcagtaatatatgccgccgttgccacgggatatcaaacaaaccgaaagcaacgaaaaagtgggtcgttagctcagttggtagagcagttgacttttaatcaattggtcgcaggttcgaatcctgcacgacccaccaatcgctaaggtggaagcggtagtaaaacgtgaaggataacgttgcatgagcaacggcccgaagggcgagacgaagtcgagtcatcctgcacgacccaccactaacatagttagttgtagtatccagcgtagtatcgggtgattagctcagctgggagagcacctcccttacaaggagggggtcggcggttcgatcccgtcatcacccaccaccgggtcgttagctcagttggtagagcagttgacttttaatcaattggtcgcaggttcgaatcctgcacgacccaccagttttaacatcgaagacagatgttaagcgtgtaggataacgttgcgtcagcaacggcccgtagggcgagcgaagcgagtcatcctgcacgacccaccactaatgacggtgggttcggtggaagtagtttgtagtatccagcgcagtatcgggtgattagctcagctgggagagcacctcccttacaaggagggggtcggcggttcgatcccgtcatcacccaccactcgggtcgttagctcagttggtagagcagttgacttttaatcaattggtcgcaggttcgaatcctgcacgacccaccagttttaacatcaaactcagatgttaagcgtgaaggataacgttgcgccagcaacggcccgtagggcgagcgaagcgagtcatcctgcacgacccaccaatcttaaagattggccccgagtaaaaatctttcaggtaacacccgtatgggtcgttagctcagttggtagagcagttgacttttaatcaattggtcgcaggttcgaatcctgcacgacccaccaatttaaaggtggttactggtagagaacgtgaaggataacgttgcgttagcaacggcccgaagggcgagacgaagtcgagtcatcctgcacgacccaccatcctgaatgattaaggcagcataatcccgcaaggggtcgttagctcagttggtagagcagttgacttttaatcaattggtcgcaggttcgaatcctgcacgacccaccaatgtaaaaaagcgccctaaaggcgcttttttgctatctgcgatactcaaagattcgaacctgcagcaggtttgagttgagcgcagcgaaacaacggagccgctcgcggcgacggcccgaagggcgagcgaagcgagtcatcctgcacgacccaccaatgtaaaaaagcgccctaaaggcgcttttttgctattcaggcatcctcaatttcactttgtaaacctgatgacatcgtcagagcttactgtgcaagcaactctatgtcggtggaattaggcgtaaaatgacgcatcctgcacattaggcgtaattcgagtgacttttccccaccattcgactatcttgtttagcatataaaacaaattacaccgataacagcgaatattacgctaatgtcggttttaacgttaagcctgtaaaacgagatggtaagatgagcgtaatgtttgatccagacacggcgatttatcctttccccccgaagccgacgccgttaagcattgatgaaaaagcgtattaccgcgagaagataaaacgtctgctaaaagaacgtaatgcggtgatggttgcccactactataccgatcccgaaattcaacaactggcagaagaaaccggtggctgtatttctgattctctggaaatggcgcgcttcggtgcaaagcatcccgcttctactttgttagtcgctggggtgagatttatgggagaaaccgccaaaattctcagtccggaaaaaacaattctgatgccgacacttcaggctgaatgtagtctggatctcggctgccctgttgaagaatttaacgcattttgcgatgcccatcccgatcgtactgtcgtcgtctacgccaacacttctgctgcggtaaaagcgcgcgcagattgggtggtaactagtagcattgccgtcgaacttattgatcatcttgatagtttgggtgaaaaaatcatctgggcacccgacaaacatctggggcgttacgtgcaaaaacagacgggtggagacattctatgctggcagggtgcctgtattgtgcatgatgaatttaagactcaggcgttaacccgcttgcaagaagaatacccggatgctgccatactggtgcatccagaaagtccacaagctattgtcgatatggcggatgcggtcggttccaccagtcaactgatcgctgctgcgaaaacattgccacatcagaggcttattgtggcaaccgatcggggtattttctacaaaatgcagcaggcggtgccagataaagagttactggaagcaccaaccgcaggtgagggtgcaacctgccgcagctgcgcgcattgtccgtggatggccatgaatggccttcaggccatcgcagaggcattagaacaggaaggaagcaatcacgaggttcatgttgatgaaaggctgcgagagagggcgctggtgccgctcaatcgtatgctggattttgcggctacactacgtggataacgaataataaggcgtaacgttacgctttgggggaaagatggatttttttagtgtgcagaatatcctggtacatataccaataggggcaggcggttatgatctcagttggatcgaagcggtaggcacgatcgccgggttgctgtgtattggccttgccagtctggagaagatcagcaactacttctttggcctgatcaacgtcaccttgtttggcattattttctttcagattcagctgtatgccagcctgctattacaggtgtttttctttgccgcgaatatttacggttggtatgcgtggagccgacaaaccagtcagaacgaggcggagttgaaaattcgctggttgccattgccgaaggcactcagctggttggcggtttgcgttgttagcattggtctgatgacggtatttatcaatccggtgtttgcatttttgacccgcgtggcagtcatgatcatgcaagcattaggattacaggttgtgatgcctgaactgcaaccggacgctttcccgttctgggatagttgcatgatggtgttatctatcgtggcaatgattctgatgacgcgtaagtatgtggaaaactggctgttgtgggtgattattaacgtgattagcgtcgttatttttgcacttcagggcgtttacgccatgtctctggagtacatcatcctgacctttattgcgctcaacggcagccggatgtggatcaacagcgcacgtgaaagaggcagtcgcgcgctgtcccattaatggtgatgatgactatggccagacaccccttcattcaggtggcagtctggcccatgacaaggttgatattccatctgaatggtggcgtgctcaatctgatagtgatccatcaggtagtgttggatctgatccaacaaggcatcgtgatcgtgtggcgggatcacctgcacatgcaacgtcatcaccggcttctcgcctaccatccatacatgtacatggtgcacattgcggacttccgggatttcccggcacatacgacgcttcagttcagcgatatccaggcttaccggtgcaccttcaagtaattcattcacgctatctttcaacagtcgccacgcgctacgcagaaccagaaggctcaccagtatgctgagaatggggtcagcaggtgtccagccagtccagataataatcaacgcggcaataatagccccaacgctacccagcaggtccccgagcacatgcagtgccgctgctcgtacgttgaggtttttctcttcgctgccgtgatgaagtaaccagaaagaaagtatatttgccagcaacccagccacggcaattgccatcatcatgccgccctcgaccggacgcggcgtgcggaagcgttctatcgcctcccagacaatcaaaatggtaattaccacgagggctatggcattcacaaacgccgcgagcgtggtcagtcttagccaaccgaaagtgtggcgaatggtgggaggacgacgactaaattgcacggcgagtagggcgaaaagcagggcggcagtatcggtcaacatatgacccgcatcggccagcaatgccagagaaccagaaagaaaaccaccaacgacttctaccagcataaacccggcagtcacgccgaaagcatacaacaagcgacgagcattattatcttctggcaggtgactggacgtgtgactgtgactgtgcgccatgacgagtcatcccttaattattctcacttaactttatgacatcatactgcttttagaagtgaaaaattaaaagggagagactccgctctcccattattggctattttgcagggttactgcgtggtaccgtcggttttggtatcgacatcattattgatgccatcaccggtttgtacctttttattgatatccggacagcgaccatctttgcacatggtgttcttgtgctcttcatctttggtcattccgtcattgttcatactagaaccatcgctatgcagcattgtgccgccagaaccggtatttaccccgttattgtcgacgttatttggcgcgacattttcacgggcgtcaggggctacctggcccgcatcagctgcggcgtttgcctggccgttattagtttgcgctccgctatcggcagccagtgcggcaccgctggcaaggcttagagtggcagtcagaaataatgtggccagttttgtcattttcataggatgctcctgttatggtcgttatgtcggataacctcttccaacagtgcatttgcaggtgaatataaggcattggtttaagatttcagccaggttatgaaacgcagcagagaatcttgaaataattaacaaacaaaggagttacagttagaaattgtaggagagatctcgtttttcgcgacaatctggcgtttttcttgctaattccaggattaatccgttcatagtgtaaaaccccgtttacacattctgacggaagatatagattggaagtattgcattcactaagataagtatggcaacactggaacagacatgaattatcagaacgacgatttacgcatcaaagaaatcaaagagttacttcctcctgtcgcattgctggaaaaattccccgctactgaaaatgccgcgaatacggttgcccatgcccgaaaagcgatccataagatcctgaaaggtaatgatgatcgcctgttggttgtgattggcccatgcagtattcatgatcctgtcgcggcaaaagagtatgccactcgcttgctggcgctgcgtgaagagctgaaagatgagctggaaatcgtaatgcgcgtctattttgaaaagccgcgtaccacggtgggctggaaagggctgattaacgatccgcatatggataatagcttccagatcaacgacggtctgcgtatagcccgtaaattgctgcttgatattaacgacagcggtctgccagcggcaggtgagtttctcgatatgatcaccccacaatatctcgctgacctgatgagctggggcgcaattggcgcacgtaccaccgaaagccaggtgcaccgcgaactggcaagtgggctttcttgtccggtcggcttcaaaaatggcaccgacggtacgattaaagtggctatcgatgccattaatgccgccggtgcgccgcactgcttcctgtccgtaacgaaatgggggcatagcgcgattgtgaataccagcggtaacggcgattgccatatcattctgcgcggcggtaaagagcctaactacagcgcgaagcacgttgctgaagtgaaagaagggctgaacaaagcaggcctgccagcacaggtgatgatcgatttcagccatgctaacagctccaaacaattcaaaaagcagatggatgtttgtgctgacgtttgccagcagattgccggtggcgaaaaggccattattggcgtgatggtggaaagccatctggtggaaggcaatcagagcctcgagagcggggagccgctggcctacggtaagagcatcaccgatgcctgcatcggctgggaagataccgatgctctgttacgtcaactggcgaatgcagtaaaagcgcgtcgcgggtaaggtttaattgtcggatgcgccgtcagagtggcgtatccgatgaatcaccacaggcctgataagtcgcgcagcgtcgcatcaggcaatgtgctccattgttagcaacaaaaaagccgactcacttgcagtcggctttctcattttaaacgaatgacgtttacttcgctttaccctggtttgcaaccgccgctgctttcgctgcgatctcgtcagcattacccagataatagcgtttcagcggtttgaaattctcgtcgaactcatacaccagcggcacgccagtcgggatattaagctcaagaatctcttcttcgctcatgttatcaagatatttcaccagcgcacgtaaagagttaccgtgtgcagcgatgatcacgcgctcaccgctcttcatacgcggcagaatagtttcattccagtaagggatcacgcggtcaatggtcagcgccaggctttccgtcagcggcagttctttctcgctcagtttcgcgtaacgcggatcgtgacccggataacgctcatcatctttagtcagttccggcggagtcactgcaaaaccacgacgccactgtttcacctgctcgtcgccatacttttcagcagtttccgctttgttcagaccctgcaacgcaccgtagtgacgttcgttcagtttccaggatttctcaacgggcagccatgcctgatccagttcgtccagcacattccacagggtatggatagcgcgtttcagcacagaagtgtaagcaaagtcaaagctgtaaccttcctctttcagcagcttacctgctgcttttgcttcgcttacgcctttctcagacagatccacgtcgtaccaaccggtgaaacggttttctttgttccactgactttcgccatgacgaaccagaaccagcttagttacagccatatacttactcctcaaatcatcttttaatgataataattctcattatattgccgcgacgaagcaacagcaatgcttacgcataaccatagcgaaaatagtggcgcagtgtaaggttgttgtgaatattgagttgcaaatatgtcggtgtttgctggtgatttgaacaatatgagataaagccctcatgacgagggcgtaacattactcagcaataaactgatattccgtcaggctggaatactcttcgccaggacgcaggaagcagtccggttgcggccattcagggtggttcgggctgtccggtagaaactcgctttccagagccagcccttgccagtcggcgtaaggttcggttccccggctcggtgtgccgccgaggaagttgccggagtagaattgcagagccggagcggtggtgtagaccttcagctgcaatttttcatctgcactccagacatgcgccgccactttcttgccatcgcctttggcctgtaacaagaatgcgtgatcgtaacctttcactttgcgctgatcgtcgtcggcaagaaactcactggcgatgattttggcgctgcggaaatcaaaagacgttccggcgacagatttcaggccgtcgtgcggaatgccgccttcatcaaccggcagatattcgtccgccagaatctgcaacttgtgattgcgcacgtcagactgctcgccgtcaagattgaaatagacgtgattagtcatattcaccgggcaaggtttatcaactgtggcgcgataagtaatggagatacggttatcgtcggtcagacgatattgcaccgtcgcgccgagattacccgggaagccctgatcaccatcatcactactcagggcaaacagcacctgacgatcgttctggttcacaatctgccagcgacgtttgtcgaacccttccggcccgccgtgcagctggttaacgccctgacttgggctaagcgtcacggtttcaccgtcaaaggtataacggctattggcgatacggttggcataacgaccaatagaggcccccagaaacgcggcctgatcctgatagcattccgggctggcacagccgagcagcgcctcgcggacgctgccatcggaaagcggaatacgggcggaaagtaaagtcgcaccccagtccatcagcgtgactaccatccctgcgttgttacgcaaagttaacagtcggtacggctgaccatcgggtgccagtgcgggagtttcgttcagcactgtcctgctccttgacttggtttacaaacgtaaaaagtctctttaatacctgtttttgcttcatattgttcagcgacagcttgctgtacggcaggcaccagctcttccgggatcagcgcgacgatacagccgccaaatccgccgccggtcatgcgtacgccacctttgtcgccaatcacagctttgacgatttctaccagagtgtcaatttgcggcacggtgatttcgaaatcatcgcgcatagaggcatgagactccgccatcaactcgcccatacgtttcaggtcgccttgctccagcgcgctggcagcttcaacggtgcgggcgttttcagtcagtatatgacgcacgcgttttgccacgatcgggtccagttcatgcgcaacagcgttgaactcttcaatggtgacatcacgcagggctggctgctggaagaaacgcgcaccggtttcgcactgttcacgacgggtgttgtattcgctgccaaccagggtacgtttgaagttactgttgatgatgacgacagccacacctttgggcatggaaactgctttggtccccagactgcggcaatcgatcagcaaggcatgatctttcttgccgagcgcggaaattagctgatccatgatcccgcagttacagcctacaaactggttttctgcttcctgaccgttaagcgcgatttgtgcgccgtccagcggcagatgataaagctgctgcaatacggttccgaccgcgacttccagactagcggaagaacttaacccggcaccctgcggcacattgccgctgatcaccatgtccacgccgccgaagctgttgttacgcagttgcagatgtttcaccacgccacgaacgtagttagcccattgatagttttcatgtgcgacaatgggcgcatcgagggaaaactcgtcgagctgattttcataatcggctgccatcacgcgaactttacggtcatcgcgtggtgcacaactgatcacggtttgataatcaatcgcgcagggcagaacgaaaccgtcgttgtagtcggtgtgttcaccaatcaaattcacgcggccaggcgcctgaatggtgtgagtggcagggtagccaaatgcgttggcaaacagagattgtgttttttctttcagactcatttcttacactccggattcgcgaaaatggatatcgctgactgcgcgcaaacgctctgctgcctgttctgcggtcaggtctcgctgggtctctgccagcatttcataaccaaccataaatttacgtacggtggcggagcgcagcagaggcggataaaagtgcgcgtgcagctgccagtgttgattctcttcgccattaaatggcgcgccgtgccagcccatagagtaggggaaggagcactggaagaggttgtcataacgactggtcagctttttcaacgccagcgccagatcgctgcgctgggcgtcggtcaaatcggtgatccgtaaaacgtgggctttgggcagcagtagcgtttcgaacggccaggcagcccagtaaggcacgacggctaaccagtgttcggtttcgacaacggtacggctaccgtctgccagctcgcgctgaacataatccaccagcattggacttttctgttcggcaaaatattctttttgcaggcggtcttcgcgctcagcttcgttaggcaggaagctatttgcccaaatctgaccgtgcggatgcgggttagagcagcccatcgccgcgcctttgttttcaaaaacctgcacccatgggtacgttttccccagttctgcggtttgctcctgccaggttttgacgatttccgtcaatgctgcaacgctgagctctggcagcgttttactgtgatccggactaaagcagatcacccggctggtgccgcgcgcgctctggcaacgcatcagcggatcgtgactttctggcgcatctggcgtgtcagacatcaaagccgcaaagtcattagtgaaaacgtaagtcccggtgtaatcggggtttttatcgcctgtcacccgcacattacctgcgcagaggaagcaatctggatcgtgcgcaggtaacacctgtttggctggcgtttcctgcgccccctgccaggggcgcttagcgcggtgcggactaaccagaatccattgcccggtgagcgggttgtagcggcgatgtggatgatcaacgggattaaattgcgtcatggtcgttccttaatcgggatatccctgtggatggcgactctgccagtgccaggtgtcctgcgccatttcatcgagtgtgcgcgttacgcgccagttcagttcacggtcggctttgctggcgtccgcccagtaggccggaaggtcgccctcgcgacgcggtgcaaaatgataattaaccggtttgccgcaggctttgctgaaggcattaaccacgtccagcacgctgttgcctacgccagcgccgaggttgtagatgtgtacgcctggcttgttcgccagtttttccatcgccacgacgtgaccgtccgccagatccattacgtggatgtaatcgcgtacgccagtaccatcttcggtcggataatcgttaccaaaaatcgccaggctgtcgcgacggcctacagcaacctgggcgatgtatggcatcaggttattcggaatgccttgcggatcttcgcccatatcgccgctcggatgcgcgccaaccgggttgaagtagcgcagcagggcaatgctccagtccggctgggctttttgcagatcggtgaggatctgttccaccatcagcttgcttttgccgtaagggctttgcggtgtgccggtcgggaagctttcaacgtatggaattttgggctgatcgccataaacggtggcggaggagctaaaaataaagtttttgacgttagcggcgcgcatggcgctaatcaggcgcagagtgccgttgacattgttgtcgtaatattccagcggtttttgtacgctttcgcccacggctttcagcccggcgaagtggatcacggtgtcgatagcgtgatcgtgcaggatctcggtcatcaacgcttcgttacgaatatcgccttcaacaaacgttggatgtttgccgcctaaacgctcgataacaggcagtacgatgcgcttactgttacagaggttatcaagaatgatgacatcatgaccgttttgcagtaattgcacacaggtatgacttccaatgtaaccgctaccaccggtaaccagaactctcataattcgctccattaggcttatggtatgaaataaccatagcataacaaagatgcgaaaagtgtgacatggaataaattagtggaatcgtttacacaagaatttagccgttttttatgcgcgattaagtgattataaaacagagggtttatgaatgattgcgctttttatctgaaaaaagacgcggtttcatgcctgcatgcgtcgaaccgttggccggagagggtgctaaggccgcctccggcaaggtcagcactaccgactcaatatatttttgtcagcacatagcgatagagtccaccgtccggcacgaactcaagacgatgggtaatacaggcaggcgcatcttcagcgtggtggctaacaaacaacaattgcgtttcaccttcgctaatcagcacatcaacaaaacggcggataagctggcgattcagcggatcaagcccctgtagtggttcatcgagaataagcaacgtcggatgtttcaccagtgcgcggacaatcagcgccagacgctgctgtccccaggaaagactatggaacggagcgtcagccgtgcgtttatcaatgccgagaatatccagccactgctgcaccagtttttgctggcgatcgctaacggcctgataaatgccaatgctatcaaaatagccagaaagaatcacattacgcacggtagtgctgacccggtaatccagatgcaaactactgctgacgtaaccgatatgctttttgatatcccagatggtttcgccgctgccgcgacgtcgtccgaaaagcgtcaaatcgttgctgtaaccttgcggatgatcgccagtaaccaggcttaataacgtgctttttcctgcaccatttggcccgacaatttgccagtgttcgcctggattcacctgccagctaaggttattaagaatggggcgatcgttataagaaaccacgccattgttcagcacaatgcgcggttcgttggcgggtaaggcgtgacgtgcactaggttcatccggctccggcagttgcacaccttcaagctgttcactatgcgccagttgcgcgacgagtgcttgttggagcagttcctctttagcgccagtttccgctaacgtgcaatccgccagcacgccagcaaactggacaaactccgggatctcatcgaagcgattgagcaccagtaccagagtaataccggactgatgtaagctggcgagtcgctcagccagctgctgacgactggcaacatccaggccatcgaacggctcatcaagaatcaacaagtcaggctcgctcatcagcgcctgacacagcagggtttttcgcgtctcgccagtggaaaggtatttaaagcgtcggtcgaggagggcggtaataccgaactgctgcgccagttgcatgcaacgcggtgcatcctttacttcatcctgaatgatctcagccgtagtgcgtccggtgtcatcttcgccagggccgagcatatcggtgttattccgctgccattcgtcgctgacgagtttttgcaattgctcgaaggagagacgagtgatgtgggaaaactggctttgccgttcacctttcaaaagcggaagttcccccgccagcgcgcgggccagggcgcttttcccgcttccattgctaccgacaaacgcccaactatcacccgcgtttaacgttagctgaggcaattgcagcgtttttgtgtcgctaagacgaaacgtgccttgcaaaatttgcaagctactcattttatatcccactttgtgcagcgattactgacagggatacgtgtttcataacaaattgtcaacacgcttagcacagcgtggcgataatcacgctgtcggcattaaagtaggccgtgacattctgtccttgctgaagagaagtcgcttcatttaccggcactgtggcgcacagtgtttgcccgtcgggtagcgccattaatacttcgcactgctctgcgccgcgctcaatatgactaataatacccggtaattggttgtcagcgttttgcgcgaccgcctcgtcctgagtaatacctacccacggcgcttttagcaatatcaacacttctttgccttcatccagccccagacgcgcgccgctttgtgcggtaattgcgactttcaggcgtgtttttccgtcagccagtaagacatcaacatgctgttgaacgtcatcatgatcgcgggcggtgatggtaccgaaccactggttacgggcgctggtttgcagactaaaacgactgatcgcggccagcaggctgttcagcggcagggcgtcatcgtcacttaacacatcaaaggctttttgctggatttgcgccagtaagtcatagagctgaatcagtcgctgaccatagcgggtcagtactgcgccgccgccacctttaccgcctgttgcgcgctcgaccagaatatgctcacttaactgattcatctcgttaatggcatcccaggcgcttttatagctaataccggcatctttcgctccctggctaatggaaccggaaagcgcaatgtgttttagtaggctaatgcggcgcgggtcggcgaataatttttgttggagcttaagggtgagaaggatttcggcctgcataacaatgtcctggcaaaagtcttattgtgacggaaaacgaacgccacgcaaagctgaccgcacaaaaggggagtgcttttctgtgcttagcggttagaatagtctcatgactatatctggagttgaccatgttagagttattaaaaagtctggtattcgccgtaatcatggtacctgtcgtgatggccatcatcctgggtctgatttacggtcttggtgaagtattcaacatcttttctggtgttggtaaaaaagaccagcccggacaaaatcattgattccctgaatgcccgcttagtcgggcattttctttttctcaacttcctgcttttcctgccgatattttttcttatctacctcacaaaggttagcaataactgctgggaaaattccgagttagtcgttatattgtcgcctacataacgttacattaaggggttaccaatggctcgtaaatggttgaacttgtttgccggggcggcactctctttcgctgttgctggcaatgcactggcagatgaagggaaaatcacggtgttcgccgccgcaagtctgactaacgcaatgcaggacattgctacgcagtttaaaaaagagaaaggcgtggatgtggtttcttctttcgctagcagttctactctcgcccgtcagattgaagcgggtgcgcctgcggatctgtttatttctgccgatcagaaatggatggattatgcggttgataaaaaagcgatcgatacagctacgcgtcagacactgctcggcaatagcctggtcgttgtagcaccgaaagccagcgtgcagaaagatttcaccatcgacagcaaaaccaactggactagtctgctgaatggcggtcgcctggcggttggcgatccggaacatgttcccgctggcatttatgcaaaagaagcactgcaaaaactgggcgcatgggatacgctctctccgaaactggccccagcggaagatgttcgtggggcgctggcgctggtcgaacgtaacgaagcgcctctgggcattgtctacggttctgacgcagttgccagcaaaggggtaaaagtggttgccaccttcccggaagatagtcataaaaaagtggaatatccggttgctgttgtggaagggcataacaatgcgacagtgaaagcattttatgattatctgaagggaccgcaggcagcggaaatctttaaacgttacggatttacaatcaagtaatgatactgaccgatccagaatggcaggcagttttattaagcctgaaagtttcttccctggctgtgctgtttagcctgccgtttgggatcttttttgcctggttactggtgcgttgcacgtttccgggcaaagctctgctcgacagcgtactgcatctaccgctggtgttaccgcccgtggtcgtcggttacttattattagttagcatgggacggcgcggatttatcggtgaacgtctgtatgactggtttggtattaccttcgcctttagctggcgcggcgcggttctcgctgccgccgtcatgagctttccgctgatggtgcgggcaattcgtctggcgctggaaggggttgatgtcaaactggaacaggccgcaagaacactgggggccgggcgctggcgcgttttctttactatcacgttaccgctgaccttaccgggaattattgttggtacggtactggcttttgctcgttctctcggtgagtttggtgcaaccatcacctttgtgagcaacattcctggtgaaacgcgaaccattccttctgccatgtataccctgatccagacccccggcggggaaagtggagcggcgagactgtgcattatttctattgcgctggcgatgatctccctgttgattagtgaatggctggccagaatcagccgtgaacgggcggggcgctaatcatgctggaactgaatttttcccagacgttgggcaaccattgcctgactattaatgaaacgctgcccgccaatggcatcactgctatctttggcgtctccggtgccggaaaaactagcctgattaacgccatcagtggactgacgcgcccgcaaaaagggcggattgtcctcaatgggcgggtactaaatgatgccgaaaaaggtatctgcctgacgccggaaaagcgtcgcgttggctatgtttttcaggatgcgcggctgttcccgcattacaaagtgcgtggcaatctgcgctacggcatgagcaaaagtatggtcgatcagttcgataagctggtggcgcttttaggcattgaaccgttgcttgaccgtttaccaggcagcctgtccggaggcgaaaaacagcgcgtggcgattggtcgggctttgctgacagcaccggaattgctgttgctggatgaaccgctggcgagtctggatattccgcgtaaacgcgaactgttgccttatctgcaacggctgacacgggaaatcaacattccgatgttgtatgtcagccatagcctggatgagatcctccatctggcagacagagtgatggtactggaaaacggtcaggtgaaagcctttggcgcgctggaggaagtgtggggcagtagcgtgatgaatccgtggctgccgaaagagcaacaaagtagcattctgaaagtgacggtgcttgagcatcatccgcattacgcgatgaccgcgctggcgctgggcgatcagcatttgtgggtcaataagctggacgaaccgctgcaagctgcgctacgtatccgcattcaggcttccgatgtttctctggttttacaaccgccgcagcaaaccagcattcgtaacgtattgcgggcaaaagttgttaatagttatgacgacaacggccaggtggaagtggaactggaagtcggcggtaaaacgctgtgggcgcgtatcagcccgtgggccagggatgaactggcgatcaaacctggcctgtggctgtacgcgcaaattaaaagtgtgagcataaccgcctgattaaatcaggtggctataaatgaactgggcaatgctgtcggtggtgttatcaccaatcacaatgttggcgcgcgcttttaccgcgtcatcggcgttgcccatcgccacgcctgtaccagcggcttccagcatactgatatcattaaagttatcgccgaatgccacgacgttttccatgctccaaccttgcgcctcaacccatttcgtcaaacgtttacctttgctgttgccgccgcgtgcaatatcaacctgatcgtgccaggaccattcacactccagtcccagttcatgttcgacatgcttaccaaaatgctgcaattgcggcaggtcatcgtgcgtcagggcgaacttccatacggcgttaacttgttgcgccgtttcagccagagaagcgacttgtgtgaaagtcggacgctgttccggcggcagggtttgcgcccagttagatgtgcgaatgacatgcccggtcgggtgctcatagaccattgcatcatcgacatacatcagaccgtgaatgtggtgttcattcagcatctcaatgagttgcagggctttaataacgggcattgggtccgcttccagcacggtttttgcatgataatcatacaaataggtgccattacagcaaatagcaggtgtatccagcgccagcgcctgataaaaaggatgaatagcgacgtgatggcgacctgtgacgatgattaattgatagcctgcttcgcgagcgcgggccagggcttctatgctactaggaagcagggtctttttcggggtcaataaggtgccgtctaagtcgagagcaatcacgcgtgtggtcatggcgtattccagattaaggttaagaattttcgtctgcgcgaatggtacaccgataccactatcggacaaaattctgcgttttaattcagcattcaccgccaaaagcgactaattttagctgttacagtcagttgctaaatgcaaaggagcattcatgaagcaaacagtttatatcgccagccctgagagccagcaaattcacgtctggaatctgaatcatgaaggcgcactgacgctgacacaggttgtcgatgtgccggggcaggtgcagccgatggtggtcagcccggacaaacgttatctctatgttggtgttcgccctgagtttcgcgtcctggcgtatcgtatcgccccggacgatggcgcactgacctttgccgcagagtctgcgctgccgggtagtccgacgcatatttccaccgatcaccaggggcagtttgtctttgtaggttcttacaatgcgggtaacgtgagcgtaacgcgtctggaagatggcctgccagtgggcgtcgtcgatgtggtcgaggggctggacggttgccattccgccaatatcagtccggacaaccgtacgctgtgggttccggcattaaagcaggatcgcatttgcctgtttacggtcagcgatgatggtcatctcgtggcgcaggaccctgcggaagtgaccaccgttgaaggggccggcccgcgtcatatggtattccatccaaacgaacaatatgcgtattgcgtcaatgagttaaacagcagtgtggatgtctgggaactgaaagatccgcacggtaatatcgaatgtgtccagacgctggatatgatgccggaaaacttctccgacacccgttgggcggctgatattcatatcaccccggatggtcgccatttatacgcctgcgaccgtaccgccagcctgattaccgttttcagcgttagcgaagatggcagcgtgttgagtaaagaaggcttccagccaacggaaacccagccgcgcggcttcaatgttgatcacagcggcaagtatctgattgccgccgggcaaaaatctcaccacatcagcgtatacgaaattgttggcgagcaggggctactgcatgaaaaaggccgctatgcggtcgggcagggaccaatgtgggtggtggttaacgcacactaaccgctgatttacccggcgcagtctctcctgcgccggtgtattaacctatctcctgtaacgcgtgtctctggcgttcgacgatattggtccacaaattgtctttatcgtcagtccataaattaatcagcaaggcaaaaaagcgttctgctgctggagaaagtacggcatctttacggcgaattattcccaatgttcgacgtataacgggttccaccaatgggataccaataatgctagaatagggcgcatgaggcattgccaggccaggaagcgcgctaatccccagtcccgcctccaccagtcctaaactcgtgctaagatgacgcacttcgtaaaaccagtccagcttccagggcttgtcggccagctgttgttctatcaacagtcggttgccgctggaggagcgtacgccaatcattttgtaacccactaactcctgccattctacaagctgctttttggccaatggatggtcacgccgacaggccagcacgaacggctcgttgaccagtggggtaaaatcaatggaactatttgtgacgttgttcatgtttatgccaaagtcactttcgttacacagcacgctttccatgcaattattcgtgccttgttccagaatccgcactttaatattgggatacagctcattaaatttaccgattgccagcggtaaaaaataaaatactgcggtcggaatacacgctaacgtcaccataccacgatgataagcattcatatcacgaatattaaaaagcgtttcatcgaatttctttattaattcccgcgcctccgggagcaacctttttcctgcttttgttaacgtaaccttgcgagttgtacgctcaaatagttgaacatgtaaatcttcctccatcttttttattcttcgcgttaatgcaggttgcgtaatattgagtaatttagcggcattgttaaagctactggactctgccagtatgacaaatgccttcatactacttaattcatgcttcattattactccggaaaatggaaggctgctttttgggtggctggccgttaaaaattttaactgcatttagccaacttaaattaatgaaaaaatgttattaatcgttgagctaaagtcattagagatgctttgcccttaatgtaaccatatcgcaataagttatgtttttaaattgagggcattattatgaaaaaaataccctgcgtgatgatgcgaggtggaaccagcaggggcgcgttcctgttagcggaacatttacccgaagatcaaacgcagcgcgataaaatattgatggcaattatgggttccggtaacgatctggaaattgacggtattggcggcggtaatccactgaccagtaaagtcgccattattagccgttccagcgatccgcgtgctgatgtcgattatctgtttgcgcaggtaatcgttcatgagcaacgtgtcgataccacgcctaactgcggcaatatgctgtctggtgttggggcattcgccattgaaaatggtttgattgcagcgactagcccagttactcgcgtacgtatccgcaacgtcaatacgggtacgttcatcgaagctgatgtgcaaacgccaaatggtgttgtcgagtacgagggtagcgccagaattgacggcgtaccgggtactgccgcaccggttgcgctcactttcctgaatgccgctggaaccaaaaccggaaaagttttcccgactgataatcagattgattattttgacgatgtcccggtgacctgtatcgatatggcgatgccagtcgtcattattccggctgaatatctgggaaaaacaggttatgaattaccggcggaactggatgccgacaaagcattattagcccgcattgaatctatccgtctacaagcgggtaaagcaatgggcttaggtgatgtcagtaatatggttatccctaaacctgtgcttatttctccagcgcagaaaggcggggcaattaatgtgcgttattttatgccgcattcttgccatcgcgcgctggcgataaccggtgctattgctatttccagtagttgtgcattggaaggcaccgtcacccgacaaatcgtcccttctgtaggatacggcaatatcaatattgaacaccccagtggtgcgctcgacgttcatttaagtaatgaaggtcaggatgccacgacgttacgcgcatctgttattcggacgaccagaaaaatattttccggtgaagtttatcttccctgaaaaaattcgttgtcaggataaggacaatcaataaaggacttctgtatgagtcatacagaaagaacaggattttaaatgaataagaaaagcttatggaagctaattctgatattagcgatcccatgtattattggttttatgccagctccggcaggattaagcgaactggcgtgggtgctttttggtatttacctggcggccattgtggggctggttatcaagcctttcccggaacctgtcgtactgttaattgccgttgctgccagtatggtggtggtcggtaacttatccgacggtgcgtttaaaaccaccgccgtattaagcggttactctagtggtaccacctggctggtgttcagcgcgtttaccttaagcgccgcatttgtgaccaccggtttaggtaaacgtattgcctatctgctgattggtaaaatcggtaacaccacgctgggtctgggttacgttacggtattcctcgatctggtactggctccggcaacaccgtctaacaccgcgcgtgcgggcggcattgtgttaccgatcatcaacagcgtggcggtggctttggggtccgaaccggaaaaaagtccgcgtcgtgtcggacattacctgatgatgtccatttacatggtcaccaaaaccaccagctatatgttctttaccgcaatggcggggaacattctggcgctgaaaatgatcaacgacattctgcacctgcaaattagctggggtggatgggcgctggcagccggattgccgggcatcattatgctgctggtcaccccgctggtgatttacaccatgtatccaccagaaattaagaaggtggataacaaaaccatcgctaaagcgggccttgccgaactaggaccgatgaaaatccgcgaaaaaatgctgctcggtgtctttgtgctggcgctgctgggctggattttcagtaagtctctgggggttgatgaatccaccgtggcaatcgttgttatggcaaccatgctgctgctgggtatcgttacctgggaagacgtggttaaaaataaaggcggctggaataccttaatctggtacggcggtattatcggcttaagctccttattaagcaaagttaaattcttcgaatggttagctgaagtctttaaaaataacctggcatttgatggtcacggtaacgttgctttcttcgttattattttcctcagcattatcgtgcgttatttcttcgcttccggtagtgcctatatcgttgctatgttaccggtatttgccatgctggcgaacgtctccggcgcaccgttaatgttaaccgcgctggcactgttgttctccaactcctatggcggcatggttactcactatggcggcgcggcaggtccggtcatctttggcgtgggttataacgatattaaatcctggtggttggtcggtgcggtactgacgatattaaccttcctggtgcatatcaccctcggcgtgtggtggtggaatatgctgatcggctggaacatgctgtaaatattctcgtcatacttcaagttgcatgtgctgcgtctgcgttcgctcaccccagtcacttacttatgtaagctcctggggattcactcgcttgtcgccttcctgcaactcgaattatttagagtatatccatttattatctttctgcgcacttcacggtgcgcagatatctggagcatttgatgatcaagttatctgaaaaaggcgtgtttctcgccagtaataacgaaataattgccgaagaacatttcaccggcgaaattaaaaaagaagaagccaaaaaaggcactattgcctggtctattctctctagccataatacgtccggaaatatggataaacttaaaattaagtttgatagtttagcctctcacgatattacctttgttggtattgtacagaccgctaaagcgtccggtatggaacgtttcccgctgccgtatgtgctgaccaactgccataacagtctctgcgccgtcggcggcactattaacggtgatgaccatgtttttggtttaagcgcggcccagcgttatggcggtatttttgtgcctccgcatattgcggtcatccatcaatatatgcgtgagatgatggcaggcggcggcaaaatgatcctcgggagtgacagccacacccgttacggtgcattagggacaatggcagtcggtgagggcggcggtgagttggtaaaacagctgcttaatgacacctgggatatcgactatccgggcgtggttgcggtgcatctgaccggaaaacctgcgccgtatgtggggccacaggatgtggcgctggctatcattggcgcggtgttcaaaaacggttacgtcaaaaacaaagtcatggagttcgttggaccgggcgttagcgcgctctctaccgatttccgtaacagcgttgacgtgatgaccactgaaacgacctgtttaagttctgtctggcaaaccgatgaagaagtccataactggctggcgctgcacggtcgcggccaggattactgccagcttaaccctcaaccgatggcgtactacgatggctgcatcagcgttgatttaagcgccatcaaaccaatgattgcgctgccgttccacccgagcaacgtgtatgaaatcgacacactgaaccagaacctgaccgacattctgcgtgagattgaaattgagtccgaacgcgtggcgcacggtaaagccaaactcagcctgctggataaagtggaaaatggtcgcctgaaagtgcagcaggggattatcgcgggctgttctggcggtaactacgaaaacgtcatcgcggcggcgaatgcactgcgcggtcaatcctgtggcaatgacaccttcagcctggcagtttacccgagtagtcagccggtgtttatggatctcgccaaaaaaggtgtggtagcagatttgattggcgcaggcgcaatcatcagaaccgcgttctgcggcccatgctttggcgcgggcgatacgccaatcaacaacggtttgagtattcgccacaccacgcgtaacttcccgaaccgcgaaggctctaagccagctaatgggcagatgagtgcggtggcgttgatggacgctcgttctatcgctgcgactgcggcaaacggtggctatttaacctctgccagcgaacttgattgctgggacaacgtgccggagtacgccttcgatgtaacgccgtataaaaaccgtgtttatcagggctttgtgaaaggggcaactcagcaaccgctgatttacgggccgaacattaaagactggccggaattgggtgcgctgactgacaatatcgtcctgaaagtgtgcagcaagatcctcgacgaagtgaccaccaccgacgaactgattccttccggtgaaacctcttcttatcgtagtaatccgattggtctggcggagtttaccctgtctcgccgcgatcccggttatgttagcagaagtaaagcgactgctgagctggaaaatcagcgtctggcggggaatgtcagcgagctgacagaggtgtttgcgcgcattaagcagattgctggtcaggagcatattgatccgctgcaaactgaaattggcagcatggtctatgcggtgaaaccaggcgatggttctgcgcgtgaacaggcggcgagctgccagcgtgtgattggcggtctggcgaatattgccgaggagtacgcgactaaacgctatcgttctaacgtcatcaactgggggatgttaccgctgcaaatggcggaagtaccaacctttgaagtgggggattacatttacatccctggcattaaagcggcgctggataatccgggtacgacgtttaaaggttatgtgatccatgaagatgcgccggtaacggaaattacgctctatatggaaagtctgactgctgaagagcgcgagattatcaaggcgggtagtttgattaacttcaataaaaaccgtcagatgtaaaaagcgccatgtgaatgtaggtcgcattcggcacttattgtcggatgcgatgcttgcgcatcttatccgacctacgaatcgcatcgaatctgtaggccagataaggcattttcgcagcatccggcacttattgtcggatgcgatgcttgcgcatcttatccgacctacaaatcgcatcgaaccgtaggccggataaggcgtttacgccgcatccggcaaatagttaattgcccttacttcttcgcctctgcaaccactttactacccacgccgcggttattgtattcccacatgcggttgtagttagtgtcattcagattgcgctgtatttcgtcgttatcatctacgctgccggtattacccgcaaacggacgattagagatcaccgcatcggcccacggtttagccgtgttaaaaccttcgttgatggcgctatcacggatcaccacctgaccgttggtattggcatcaacatccaggctgcggcccagttgcgccacaccatcaccgaaagcattgaaacggctgtttacggcgaggaaaccgtagtaaatgttggacagcgtagccggtgcaaacacatacgcttcttgctgagtacgactgttcaccacgcggaattcggtgttatcgaacaccactgcgccgcgaccagaaacgatatccacatccccttcaatgtagctgttggtcaccagcgtacgcggctgacgattcgtttccagacggttctgcacaccgctgttggtgacaaagaaggtgttctgacgaccgagaatgttaacgttgttaatctgtacctggtcaccatcagtacgcagtgccaccgccggatggttacctgcatctacgctatcgcccagcgtgttttcgatggtcagattttgcagttgcaggccattgttttgactccagaagaccgcagagcagagaacaccgatactgtcgctgcgtttgctctggcagctatcgtacatataccacgctggtttacctggcatatatttgccgcgcgggttgacgtcgtgacgccagtcggcagggctcatgccaccatcaagggaaagcccaatcttcacatcaatcggtttttcacctgtaccgtacagagtaattccacccggagcggcagggacatataccgttccctgatactcaccaggcatcacggcaatatactggcgcttgttggtacgcttgataattgccgcatctaccgccgcctgaatcgtggtatgcgttacaccttgagtgcccgccgggccgacaacaaagtcaggttgcgcaggcagggtaatcggggaaggattccacgctgcagcacctggtgtcagggatgcaaaatagtgttgagcatcgaaattctgcgcttcttttgcgctcagaatcgggcgagaagaggtaccaggcgcggtttgatcagaaggacgttgatcgggcggggtactgctacaggcggtcagcgtcacgccaaaagccaatgccagcgccagacgggaaacactaaatgtgttcacaggttgctccgggctatgaaatagaaaaatgaatccgttgaagcctgcttttttatactaacttgagcgaaacgggaaggtaaaaagacaaaaagttgtttttaatacctttaagtgataccagatggcattgcgccatctggcagagtgattaactaaacatcgcagtaatgctggcgcttgccagagagtggaaatgaacgttaaacccgaccatcgcgccgctggcaccttcatcgacatcaatacgttctatatccagcgcgtgaacggtaaaaatgtagcgatgagtttcgcctttcggcggtgctgcgccatcgtacccggttttaccaaagtcggtacgcgtctgcaaaacgccgtctggcattgctaccagaccagagccaaacccttgcggtaatacgcgggtatcagcgggtaagttaacaactacccagtgccaccagccggagccggttggcgcatccgggtcgtagcaggtgacaacaaaacttttcgttcccgcaggaacatcatcccacgccagatgcggactaatattatcgccatcgtaacccatgccgttaaagacatgacgatgcggcaatttatcgccatcgcgcagatcgttactgatgagtttcatgaaccctcctttcttgtttgcagaaagtgtagccagaaaccctcacgcggacttctcgttattggcaaaaaaatgtttcatcctgtaccgcgcggttaaccgctgcggtcagacgctgcaactgttgcgggagaataatatagggcggcatcaggtaaatcagtttgccaaaaggccggatccagacaccctgttcgacaaagaatttttgcagcgccgccatattcaccggatgagtggtttcgaccacgccaatggcccccagtacgcgcacatcggcaaccatttcggcatcacgggcgggggcaagttgctcgcgcagctgtacttcaatatccgccacctgttgctgccagtcgccagattcgagaatcgccaggctggcgtttgctgccgcgcaggccagcggattgcccataaaagttggcccatgcataaagcaaccggcttcaccgttactgatggtttctgcaacctcgcgcgtggtgagtgtggcggaaagggtcattgtgccgccggttaaggctttaccgaggcacaaaatgtccggcgcgatttctgcatgttcacaggcaaacagtttcccggtacgaccaaatccagtggcgatctcgtcggcaatcagcaagataccttcgcgatcgcatattttgcggattcgttttaaccattccggatggtacatgcgcatcccgcctgcgccctggacaatcggctcaatgatcaccgccgcgatttcatgacgatgcgccgccatcaggcgggcaaagcccaccatatcgcgctcatcccattcgccatccatgcggctttgcggggcgggagcaaacaggttttctggcaggtagcctttccacagactgtgcatactgttatccggatcgcacacgctcatcgcgccaaaggtatcgccatgataaccattgcggaaggtcagaaaacgctggcgcgcttcgcctttggcttgccagtactgcaacgccattttcatcgccacttccaccgctacggaaccggagtccgcgagaaaaacgcactccagcggttgcggcgtcatcgccaccagtttgcggcacagctcaatggctggcgcatgggtgataccgccaaacatcacatggctcatggcatcaatttggctcttcatcgccgcattaagctgcgggtgattgtagccgtggatcgccgcccaccaggagctcataccgtcaaccaggcgtctgccgtcagacaaaatcagctcgcaaccttcggcgctcaccaccggataaaccggcagaggggaggtcatggatgtgtatgggtgccagatatggcgttggtcaaaggcaagatcgtccgttgtcataatcgacttgtaaaccaaattgaaaagatttaggtttacaagtctacaccgaattaacaacaaaaaacacgttttggagaagccccatggctcaccgcccacgctggacattgagccaagtcacagaattatttgaaaaaccgttgctggatctgctgtttgaagcgcagcaggtgcatcgccagcatttcgatcctcgtcaggtgcaggtcagcacgttgctgagcattaagaccggagcttgtccggaagattgcaaatactgcccgcaaagcagccgctacaaaaccgggctggaagccgagcggttgatggaagttgaacaggtgctggagagcgcgcgcaaagcgaaagcggcaggaagcacgcgcttctgtatgggcgcggcgtggaagaatccccacgaacgcgatatgccgtacctggaacaaatggtgcagggggtaaaagcgatggggctggaggcgtgtatgacgctgggcacgttgagtgaatctcaggcgcagcgcctcgcgaacgccgggctggattactacaaccacaacctggacaccagcccggagttttacggcaatatcatcaccacacgcacttatcaggaacgcctcgatacgctggaaaaagtgcgcgatgccgggatcaaagtctgttctggcggcattgtgggcttaggcgaaacggtaaaagatcgcgccggattattgctgcaactggcaaacctgccgacgccgccggaaagcgtgccaatcaacatgctggtgaaggtgaaaggcacgccgcttgccgataacgatgatgtcgatgcctttgattttattcgcaccattgcggtcgcgcggatcatgatgccaacctcttacgtgcgcctttctgccggacgcgagcagatgaacgaacagactcaggcgatgtgctttatggcaggcgcaaacagcattttctacggttgcaaactgctgaccacgccgaatccggaagaagataaagacctgcaactgttccgcaaactggggctaaatccgcagcaaactgccgtgctggcaggggataacgaacaacagcaacgtcttgaacaggcgctgatgaccccggacaccgacgaatattacaacgcggcagcattatgagctggcaggagaaaatcaacgcggcgctcgatgcgcggcgtgctgccgatgccctgcgtcgccgttatccggtggcgcaaggagccggacgctggctggtggcggatgatcgccagtatctgaacttttccagtaacgattatttaggtttaagccatcatccgcaaattatccgtgcctggcagcagggggcggagcaatttggcatcggtagcggcggctccggtcacgtcagcggttatagcgtggtgcatcaggcactggaagaagagctggccgagtggcttggctatagccgggcactgctgtttatctctggtttcgccgctaatcaggcagttattgccgcgatgatggcgaaagaggaccgtattgctgccgaccggcttagccatgccagtttgctggaagctgccagtttaagcccgagccagcttcgccgttttgctcataacgatgtcactcatttggcgcgattgcttgcttccccctgtccggggcagcaaatggtggtgacagaaggcgtgttcagcatggacggcgatagtgcgccactggcggaaatccagcaggtaacgcaacagcacaatggctggttgatggtcgatgatgcccacggcacgggcgttatcggggagcaggggcgcggcagctgctggctgcaaaaggtaaaaccagaattgctggtagtgacttttggcaaaggatttggcgtcagcggggcagcggtgctttgctccagtacggtggcggattatctgctgcaattcgcccgccaccttatctacagcaccagtatgccgcccgctcaggcgcaggcattacgtgcgagcctggcggtcattcgcagtgatgagggtgatgcacggcgcgaaaaactggcggcactcattacgcgttttcgtgccggagtacaggatttgccgtttacgcttgctgatagttgcagcgccatccagccattgattgtcggtgataacagccgtgcgttacaactggcagaaaaactgcgtcagcaaggctgctgggtcacggcgattcgcccgccaaccgtacccgctggtactgcgcgactgcgcttaacgctaaccgctgcgcatgaaatgcaggatatcgaccgtctgctggaggtgctgcatggcaacggttaataaacaagccattgcagcggcatttggtcgggcagccgcacactatgagcaacatgcagatctacagcgccagagtgctgacgccttactggcaatgcttccacagcgtaaatacacccacgtactggacgcgggttgtggacctggctggatgagccgccactggcgggaacgtcacgcgcaggtgacggccttagatctcagcccgccaatgcttgttcaggcacgccagaaggatgccgcagaccattatctggcgggagatatcgaatccctgccgttagcgactgcgacgttcgatcttgcatggagcaatctcgcagtgcagtggtgcggtaatttatccacggcactccgcgagctgtatcgggtggtgcgccccaaaggcgtggtcgcgtttaccacgctggtgcagggaagcttacccgaactgcatcaggcgtggcaggcggtggacgagcgtccgcatgctaatcgctttttaccgccagatgaaatcgaacagagcctgaacggcgtgcattatcaacatcatattcagcccatcacgctgtggtttgatgatgcgctcagtgccatgcgtagcctgaaaggcatcggtgccacgcatcttcatgaagggcgcgacccgcgaatattaacgcgtagccagttgcagcgattgcaactggcctggccgcaacagcaggggcgatatcctctgacgtatcatctttttttgggagtgattgctcgtgagtaaacgttattttgtcaccggaacggataccgaagtggggaaaactgtcgccagttgtgcacttttacaagccgcaaaggcagcaggctaccggacggcaggttataaaccggtcgcctctggcagcgaaaagaccccggaaggtttacgcaatagcgacgcgctggcgttacagcgcaacagcagcctgcagctggattacgcaacagtaaatccttacaccttcgcagaacccactagcccgcacatcatcagcgcgcaagagggcagaccgatagaaagtttggtaatgagcgccggattacgcgcgcttgaacaacaggctgactgggtgttagtggaaggtgctggcggctggtttacgccgctttctgacactttcacttttgcagattgggtaacacaggaacaactgccggtgatactggtagttggtgtgaaactcggctgtattaatcacgcgatgttgactgcacaggtaatacaacacgccggactgactctggcgggttgggtggcgaacgatgttacgcctccgggaaaacgtcacgctgaatatatgaccacgctcacccgcatgattcccgcgccgctgctgggagagatcccctggcttgcagaaaatccagaaaatgcggcaaccggaaagtacataaaccttgccttgttgtaaccattctgtatttggttaaattgcgagcgagatcgcgtcttcgattgactgcaatttaaccaattaaattctaaaataatcacgaaaaaaattttacttccgcctcatgcggcgaatgtgggaattgcccaggcggcgggggataggggctggagacagttatccactattcctgtggataaccatgtgtattagagttagaaaacacgaggcaagcgagagaatacgcggcttgcacgcgaattggcgttaaagacggctcaaagaaatatcttttattttttaactggttagataaatgcaatggcagtcactgaacaggcatctcttgccataaaactgtcatcactcatcttgacaaatgttaaaaaagccgttgctttggggataacccggtaaggccggagttttatctcgccacagagtaaattttgctcatgattgacagcggagtttacgctgtatcagaaatattatggtgatgaactgtttttttatccagtataatttgttggcataattaagtacgacgagtaaaattacatacctgcccgcccaactccttcaggtagcgactcatgagtaaaccgttcaaactgaattccgcttttaaaccttctggcgatcagccagaggcgattcgacgtctcgaagaggggctggaagatggcctggcgcaccagacgttacttggcgtgactggcagtgggaaaaccttcaccattgccaatgtcattgctgaccttcagcgcccaaccatggtacttgcgcccaacaaaacgctggcggcccagctgtatggcgaaatgaaagagttcttcccggaaaacgcggtggaatatttcgtttcctactacgactactatcagccggaagcctatgtaccgagttccgacactttcattgagaaagatgccagcgttaacgaacatattgagcagatgcgtttgtccgccaccaaagcgatgctggagcggcgtgatgtggttgtggtggcgtctgtttccgcgatttatggtctgggcgatcctgatttatatctcaagatgatgctccatctcacggtcggtatgattatcgatcagcgcgcgattctgcgccgactggcggagctgcaatacgctcgtaatgatcaagcattccagcgtggtactttccgcgttcgtggcgaggtgatagatatcttcccggcagaaagcgatgacattgcacttcgcgtggaactgtttgacgaggaagtggaacgattgagcttatttgacccgctgaccgggcagattgtttccactattccacgttttaccatctacccgaaaacgcactacgtcacaccgcgcgagcgcatcgtacaggcgatggaggagatcaaagaagagctggccgccagacgcaaagtgctgttggaaaacaacaaactgctggaagagcagcggctgacccagcgtacccagtttgatctggagatgatgaacgagctgggctactgtagcgggattgaaaactacagccgcttcctctccggtcgtggaccgggtgagccaccgccgacgctgtttgattacctgcctgccgatgggctgctggtcgtcgatgaatctcacgtcaccattccacaaattggcggcatgtatcgcggtgaccgggcgcgtaaagagacactggtggagtacggcttccgcctgccaagtgcgctggataaccgtccgcttaagtttgaagagttcgaagcattagcgccgcaaaccatctatgttagcgcgacgccgggtaattacgagctggaaaaatccggcggcgatgtggtggatcaggtggtgcgtccaaccggattgcttgacccgattatcgaagtgcggccggtggcgacacaggttgatgatcttcttagcgagattcgtcagcgagcggcaattaacgaacgcgtactggtcaccacactgaccaagcggatggcggaagatcttaccgaatatctcgaagaacatggcgagcgcgtgcgttatcttcacagtgatatcgacaccgtcgaacgtatggagattatccgcgacttgcgtctgggtgagttcgacgtgctggtagggatcaacttactgcgcgaaggtctggatatgccggaagtgagcctggtggcgatcctcgacgctgacaaagaaggcttcctgcgttccgaacgtagcttgatccagaccattggtcgtgcggcacgtaacgttaacggtaaagcgattctctacggcgataagatcaccccaagtatggcgaaagcgattggcgaaaccgaacgtcgccgtgagaaacagcagaagtacaacgaggaacacggaattacgccgcaaggcttgaacaagaaagtggtcgatatcctggcgctggggcagaacattgccaaaaccaaagcgaagggcagaggaaaaagccgcccgattgttgagccggataatgtgccgatggatatgagccctaaagcgttgcagcagaaaatccatgagctggaagggttgatgatgcaacacgcgcagaatctggagttcgaagaagcggcgcaaattcgtgaccagttgcatcagctgcgtgagctgtttatcgcggcaagctaacaggatagcgaagaagactgatgacaaacggaaaacagcctgatgcgctacgcttatcaggcctacattttctccgcaatatattgaatttgcgcggtttgtaggccggataaggcgttcacgccgcatccggcataaacaacgcgcactttgtcttcaataggaagccggaattttccttcggatttccgttaacctaaagcctgtaacgccttttccagcgcgttatgtaacaactggcggtcatgacgatacggaatatcgctggcctccagtacctcctggatcacaatccgctctttcaccgcgctgacatccacttttggcccgacgatgaccgcatcaatgacctttttaccaacatactgctccataattgccagcttgctttccagcttcaaattagccgcaggtaaactcaactcacgccccagattgccgatataaaccatcggcgctggcgtgcggcgtaatgcctgggcgatttccttcagcagcagaattggcatcaggctggtataaaaactgccaggcccaataatgatgagatccgcttcattgatagcgtgaaccgcctcacgcgttgcgggtacattaggcgttaacaataactcttgaatcggcgtagttaactggtcgatattgacctcgccgtaaacttcatgcccctgatcgtcaatcgccatcagatcaacaggatgctcactcattggaatcaaatgcgtatccactttcagcagattacgaattaaattgatggcttccagaggccgcacgctaaggtgatccagcgcctttaacatcaagtttccgagattatgaccggaaagttcgccattgccaccaaaacggtattcaaacatcgcggaggcgacgctcggttccgttatcagctggttgaggcagttgcgcatatcgccccaggcaatgccgccttcactacggcgaatacgccccgtgctgccaccattatcggtggtggtgacgatacccgttaaacgagaacccaaagagctaagactactgagaacgcgtcccagtccatgccctccgccgagagcaacgacacgatcaagatcagccagcgtacgattgcgcatatagtttcctggagtcagattatccgcgctacagtagcgcaaattgcggggaaacagcaattaacctgccaatattgaggatacaaactattttcttctacctctaaaggacgatgcacgctatgcctccctgatgatgtatatcaaagtaaaaccgccattttcccttattctgtagcgaaatagcacgatcatgacgctatatacatgattacatagcgaaagtgtggatggtaaaaatctcatttacacgctagtatcggcataaccactaaacactctagcctctgcacctgggtcaactgatacggtgctttggccgtgacaatgctcgtaaagattgccaccagggcgaaggaagaaatgacttcgcctcccgtatctggaaaggtgtacatggctagtcaactgactgatgcatttgcgcgtaagttttactacttgcgcctgagcattaccgatgtgtgtaactttcgttgcacctactgcctgccggatggctacaaaccgagcggcgtcaccaataaaggctttcttaccgtcgatgaaattcgccgggttacgcgcgccttcgccagactgggcaccgaaaaagtgcgcctgacaggaggagagccgtctttacgccgcgactttaccgatatcatcgccgctgtgcgggaaaacgacgctatccgccagattgcggtcacaaccaatggttaccgtctggaacgcgatgtggcgagctggcgcgatgcgggacttactggcattaacgtcagtgtcgacagtctggacgcccgccagtttcacgctattaccgggcaggataaattcaaccaggtcatggcagggattgatgctgcatttgaggccggttttgagaaggtcaaagtcaataccgtgctgatgcgtgatgttaatcatcaccagctcgacacctttctgaactggatccagcatcgccctatccagctgcgtttcatcgaactgatggaaacgggcgagggcagcgagctcttccgtaagcatcacatctctggtcaggttctgcgtgacgagctactgcgtcgcggctggatccaccaattacgtcaacgcagcgacggtcccgcgcaagtcttttgccatccagattacgccggagagattggccttatcatgccgtatgaaaaagacttctgcgccacttgcaaccgcctgcgcgtttcctccattggtaaactccatctctgcctgtttggtgaaggcggcgttaacctgcgcgatctgctggaagacgatacccagcaacaggcgctggaagcgcgtattagtgcggcgctgcgggagaagaaacagacccatttcctgcatcaaaacaacaccggtattacgcaaaacttaagctacattggcggctaaaacgtcaaaaggagagatcagatgagtcaggtaagcactgaatttatcccgacccgtattgctattcttacggtttctaatcgtcgcggtgaagaagacgatacctccggtcactatctgcgcgatagcgcgcaagaagcgggccatcacgttgtcgataaagccattgtgaaagaaaaccgctacgctattcgcgctcaggtatctgcgtggatcgccagcgacgatgtacaagtggtattgattacgggtggtactggcctgacggaaggtgatcaggctcccgaagcattgctgccgttgttcgaccgtgaagttgaaggttttggtgaagtgttccggatgttgagctttgaagagattggcacttccacgttgcaatctcgtgcggtagcgggcgtcgccaacaaaacgctgattttcgccatgccgggtagcaccaaagcgtgccgtaccgcatgggaaaatatcatcgcgccgcagctggatgcccgtacgcgtccgtgtaatttccatccacatttgaagaaataagtatgagccaactgacccatatcaacgccgctggcgaagcgcacatggtggatgtctccgccaaagcggaaaccgtgcgtgaagcgcgggcggaagcctttgtcaccatgcgcagcgagacgctggcgatgattattgatggtcgccaccacaaaggcgacgtatttgccactgcgcgtattgccggtattcaggcggcaaaacgcacctgggatctgatcccgctctgtcatccgctgatgctcagcaaagttgaagtcaatttacaggccgagccggagcacaatcgggtgcgtatagaaaccttatgccgcctgaccgggaaaaccggtgtcgaaatggaagcattaaccgcggcctccgtggcggcgctgaccatttatgacatgtgcaaagcggtgcaaaaagatatggtgattggtccggtacgtttgctggcgaagagcggcggcaagagcggtgactttaaggtggaagcggatgattaaagttctttttttcgcccaggtgcgcgagttggtgggaacagatgcaaccgaagtggctgcggatttcccaactgttgaagcgttacgccagcacatggctgcgcagagcgatcgctgggcgctggcgctggaagatggcaaattactggctgccgtcaaccagacgctggtgagttttgaccatccgctgactgacggcgacgaagtagctttcttcccgccggtaaccggaggttaagatggcagaaaccaaaattgttgttggtccgcagccgttcagcgtaggagaagagtacccgtggctggcggagcgtgacgaagacggtgcggtagtcacctttactggtaaggtgcgcaaccataacctgggcgacagcgtcaacgcattaaccctcgaacactatccggggatgactgaaaaagcactggcagaaattgttgatgaagcgcgtaaccgctggccgctggggcgcgtcactgtgattcaccgcatcggggaattatggccgggcgatgaaatcgtttttgtcggtgtcaccagtgcgcatcgcagcagtgcgtttgaagccgggcagtttattatggattatctcaaaacccgcgcaccgttctggaagcgcgaagccacgccggaaggcgaccgctgggttgaagctcgggagagcgatcagcaggcggcaaaacgctggtaattttttgttagccggataaggcaccgctgcgtccggcaatttcaccgctcagtacatacgtttacgctgcgtcgatgcacagcctcatcattttgcagtatccttaagatattccttatatcttcaggagatcgtcatggacagattcccacgttctgatagtatcgtacaaccccgggctggcttgcaaacttatatggctcaagtctatggctggatgaccgttggcttgttgctgaccgcatttgttgcctggtatgcggctaattccgcggccgtgatggagctgttgttcactaaccgtgtctttttaatcggtctgatcatcgcgcaattagcattggttattgtgttaagtgcgatgattcaaaagctgagcgcaggtgtaacgacgatgctctttatgctttatagcgcgctgacgggtcttacgctttccagtatattcattgtctataccgctgcttctatcgccagtactttcgtcgttactgccgggatgttcggcgcaatgagcctgtacggttacaccacgaagcgcgatttaagtggctttggcaatatgctgtttatggcgttaatcggcattgtgctggcaagcctggtcaacttctggttgaaaagcgaagcattgatgtgggcagttacctacatcggcgtgattgtctttgtcggattgacggcgtatgacacgcagaaactgaaaaatatgggtgagcagattgatacccgcgacacgagcaacctgcgcaaatattccattcttggcgcgttaaccttgtatctggacttcatcaacctgttcctgatgttgttgcggatcttcggcaaccgccgttaattctttttcaccatcactatcccggccatgtgtcgggatttttttcttactaaaaacgacacttaacaagtaccaggtataaaatatgccttatggacgagcggaagcgttttctgtatccataaatgcaaaagtattttgtatgcgtggttttaaatttattgatggtgaatattaatattttttctaaggataactaaaagaatggaaagttacagccaaaacagcaataaattagattttcagcacgaggccaggatattaaacggtatatggctcattaccgctttaggtttggtggcaaccgcaggactagcctggggagctaagtatatcgaaattacggcaaccaaatatgatagtccaccaatgtatgtcgccatagggttattattactttgtatgtatggcttaagtaaggatatcaacaagataaatgccgccatcgcgggcgtaatatatctgtttttactctctttggtggcgattgtcgttgcaagtttagttcctgtatatgccattatcatcgtgttcagcactgcgggcgcgatgtttttaatcagtatgctggccggtttattatttaatgttgatcctggttctcaccgttttatcattatgatgacgttgacagggttggccctggtaatcatcgtgaatgcggcattaatgagtgaacggcccatttggataataagttgcttaatgattgtgttatggagtggcattatcagccatggacgaaataagctccttgaattggcggggaaatgccatagtgaagagttgtggagtccggttcgttgcgcttttacaggtgcattaacactctattactattttatcggcttctttgggatacttgccgcgatagctataacgcttgtctggcaaaggcatacgcgtttttttcattaaccgtaaatgcacatactaaagaacttaactaaacttcacatcgccgcttcatttttcgcccgtagcttcttcgcctggctttccagcaacaggtaacagatcagcgccagcagcagtgggataaagtaatacagcacacggtaagcgagtagggcggcgataattgtacctttggaggtatgctccccagccagtagtgcgataaacaccgcttccagcacaccgatccccgccggaatatgcacgatgacgccagcaatactactaaccagtaacacgcccagtacaaagaaatagttcacgctttgaccaagtaacagccagataatcgcccccattaccatccagttaacgctggaaatcagcatctgagcgagggcgaatttccaactaggcagcaccagcttttgccctttgatggtcatatggcggtgcttcgcgaaagcgcaaaaccacaaataaaccgcgataatcatcagtaagccaatgccgagaatacgcagcgtagtttgatcgacataccagtgatccggcaactccaccacgcctgcggtaaagataatccctgccagtaaaatgtagcccagccagttggtggtaatactgaggctgaaaatccgcgtaatagtgctaccgggcaaccccagacgagagtacaaacgatagcgcataccaatgccgccgacccaggtactgagcgtcaggttgaaggcgtagcagataaagctcaccagcatcacctggcgcttcgccagtttgtgaccgcagtaaaagcgggcgagcaggtcatagcagccgtaaatcagatagctgacgaccaccagcccgaccgcactaagcagcgcaacgcgattgtagtcgcggatgaccttccagacctcttcccagtccacttttttggcgtagaccaccagcaacacaatcaccgcgataaaaaacagccaggtgaggatcttctttgctaagcgccagcgcgggtgacttttactcatcagggttttacccccgtgttttcagtttctacccgatcctgcgtttccattgtcggttgtgcgggcggatcaacctgcgccagacgtggcgtgtgtgccggaagccagccaaccagcgccgggaagtggcgtaaaaagtggaacgccagcacgcttttggtcaggttccaccaggtgcgtttgggcagcatggtttcatccacctgctgacaatctgcggcaataatgccgttcagattatcgcgcagcgtctggttaaaatgacgatcgtggatgatgacatttgcttcgagattcagactcaaactgagcggatcgagattactggaccctactgtcgcccagtgatcgtccatcaatgccactttgccgtggagcgggcggcggcggtactcaaaaacctgaacgccgcctttaaccagatagttatacagcaagcgcgcaccgactctgacaatcggcatatccggttcgccctgaatgatcagtttgatccgcaccccgcgccgtgccgctttacgcaaggcgtgtaaaaatcgatagccggggaagaagtaggcgttggcgataatcacttcccgccgcgcctgagtgagcattttcaaataatggcgttcaatatcatcgcgatgttcttcgttatcgcgccagaccagcaatacctgcgcttctcccggctggcggttctcttccgctttgtgatgacgtcgccaccagcgtcgtgccgcgctctgtccaggcaggttttccagctcaaactggagaatatcttcgacaatcggcccttcaaggcgtaccgcgtaatcctgtttagcctctggaccgtagctggacatatgctcggcggagtaattcagcccgccaataaaggctatacgcgcgtcgatcaccacaattttgcgatgcatccggcgaaacacattggtgcgcataccaaaaaggcgagggcggggatcgtagtagcggaacactacgccagctgccgtcagttcattgacaaactcatcgctgagatccgggctaccgtagccatccagcaagacttccgctttaaccccgcgttgcgctgctgccagtagtgccgcatgcagttgtttgccgacgtcatcctcaaaccagataaacgtttcaagaatgatgcgttcttgtgcctcgccaatcgccttaaacaccgcgggataatattgctcgccgttttccagcaactggatcttattgccttcgcgccagctacatttcataaatgaatctccgcacttaaaggggcatgatcagaaaggtgtcgccatgtccgcagcggcaacgcggttggcgcgctggcgctggcatttttgacgtagatcctgtccagtcgtagtagaggaaattgcaccggaaacgtgcgcgccgggcgtccgtgggcgcgggtaaaaatctcatccagtccggcctgcacttttaacggatgattagctttttgccgccagtcattgaaatcacccgccaccaataccggttcgccgtccggtagctcattcacccattcggcgagcatcgcaagctgcgcctgacggtgcgcctcacgcaggcccagatgtacgcacatcacatgaatcgcttttccggtcatcggcggcacaatgcggcagtagagcacgccgcgcttttccgcaccatcgacgctaacatcgcgattctcataatgttcaatgggataacggctcagtacggcgttgccgtgatgcccttccgggtatacggcattgcgaccgtaggcaaaatcgctccacatagtgtcggcgagaaactcgtagtggctggtatcgggccagttttccacatgcagcggatgaacttcgtgcgcgcccatcacttcctgcaggcaaacaatatcggcgctgacggtacgcacggcgtcgcgaagttccggcaaaatgaagcgtcggttaaacgcggtaaagcctttgtgaatattgatggtgagcaccttgaagctaaattgttgtgtttgatcgggcataattttcctgtctttgcctcttatctcattgaaatagtgtagtcggcgtcacaaaaaggtgcggtcttacggaattttccgtaaagttcggtactctgagtaagtagagataaattcttcaggagagaagccatgaagtggcaacaacgtgttcgtgtcgcaacgggtctaagttgctggcagattatgttgcatttactggtagtggcgctgctggtggtgggctggatgagtaagactctggttcacgtcggcgtgggattatgcgcactgtattgtgtcacggtagtgatgatgctggtgtttcagcgccaccccgagcaacgctggcgtgaggtggcagacgtgctggaagagctgaccacgacctggtattttggcgcagcgctgattgtgctgtggctgttgtcccgcgttctggaaaacaactttttgctggcaattgcagggctggcaatccttgccggcccggcggtagtgtctttgctggcgaaagataagaagttacatcaccttacgtctaaacatcgcgtacgccgctgattacatcaccttacgtctaaacatcgcgtacgccgcactccctgtcgtggccgttatcaccagtagcggccacaaactattccacacaatatccagactcgcatccttcaaataaatctgcttggtaatgtccgtaaagtggcgaatagggttaatccacgtcaggttttgcagccataccggcatgttttccaccggagaaacgtaaccggaaaggagaatggcgggcatcataaagacaaacacgccgataaacgcctgctgttgtgtactacagagactactaatcaacagaccgaatcccaccaggcttaaaccataaatcaccatcgtaaagtagaacagcgccaggcttccggcgaaggggatttgatacgcccagataccaatcgccagcacaatggtggcctggaaggtggcgacaattaacgccggtacggctttgccgatgaagatctgccaggtggtgagcgggctaaccagtagctgatcgagcgtaccttgttcacgttcgcgggcgacggaaagactagtgacgatcattacgccgatagtggtgatcatggcgatcagactcggcaccacaaaccatttgtagtcgagattcgggttataccagttgcgtaccaccagctcgctgttgttaggtttcggttttccttccagcagctcctgctgataatttttgacgatctgttgcaggtagttggcggcaatttgcgcactgttggagttacgcccgtcgaggatcaactgcaaaggcgcggtctggaaggtatccagtttgcggctgaagtcagccgggaaacgcaccagtagtaacgccttttgtgtgtcgatggttgggcggatctcctgtgggcttttcagcagcagcacatgagtaaaggcgctggcgcgggcaaaacgttgggtcagctccacgctatgctcgccgttatcttcatcgtagatggcgatggtggcgttagtcacttccagcgtggcggcgaacgggaacaggatcacctgaattagcacgggtaaaatcagaatcgcgcgggtttgcggttcgcgcagcaagctctgcaactctttgcggattaacgtccataagcgatgaaacatgctcttctccttaatccagccgacgtttggttttcagccacgtcaggccgataaacatcaccgcgctagcgatcaaaaacagcacgtttaccaccagcaccactggaatattcccggcgaggaacaggctttgcagggtgctgacgaaataacgagcgggaataatgtacgtcaccgcgcggatcaccgcgggcatactgtcgatctgaaaaataaagccggaaagcataatgctcggcagaaaagcggcgttcagggcgacctgagcggcattgaactggttgcgggtaatcgtggaaatcagcagccccatccccagggtactgagtaaaaacaggctggagataaaaaacagaatcagcaggctcccgcgatacggcacgccgagaataaacacactcaccagcatacacagcaacatcgccagcatcccgagaaagtaataagggatcagcttacacagcagcagttccgtgcgggtaatctccgtagagagcagagcctccatggtgccgcgttcccattctcgcgccaccaccaggctggtgagaatcgcgccgatgaccgtcatgataatggtcaccgcaccggggataatgaagtgctggctaatcgccgccgggttaaaccagtagcgggtttgtacatcaataagcggttcaaaagtctgcccgttgtcctccgctcgctgcatttgccagatctgccagatcccttcgacatacccctgtacaaagttagcggtattcggctcactgccgtcggtgatcacctgaatcggtgcggtggcgttggcgcgctccatctgttccgcaaaatccaccggaataaccaccagaccgcgaattttccccgcctgcattttggcgatcagttcctgacggttatcgctgatggtggcgtcgatgtaggggctaccggtcatggtgtgggtgaaatccagcgccgcttcgctacgctgttccagtaaaatcccgacccgcagcttgctggagtcgaggttaatgccgtaaccaaaaataaacagcagtagcagcgggatcactaccgcaatcagccagctactcggatcgcgaacgatctgccgcgtctctttaacgcacagcgcccgtacgcgacgccaggacaggatcgggttactcattgctatgctccttatcccagtcgtggatcaactgaataaaggcttgctccatggtgggatcgggttgctcatcgttagcgctctgtgctttcaaatcgtccggcgtgccgctggcgattaatttcccgcggtacaccaggccgatgcggtcgcaatattccgcttcatccataaagtgggtggtgaccatcaccgtgacgcctttctctaccatgctgttgatgtgcagccaaaattcacggcgggtgagggggtcaacgccggaagtcggttcgtcgagaaacagaatgtccggttcatgcatcaggctacaggccagcgccagccgctgtttaaaacctaatggcagttcatcggtggcgtgggaggcgatacttttcaggccgaacgcctcgctcatgcgggagattttttcgttctgcgcccgaccgcgtaagccatacacaccagagaaaaagcgtaaattctgttcgaccgtcaggttaccgtagaggctaaatttttgcgccatatagccgagatgctggcgcgctttaccggaactctctttcagatccatccccagcaccagcgcctggccggaagtcggcaccagcaaaccgcacatcatcttaaaggtggtgcttttacccgcgccgtttggccccagcaaaccaaaaatctccccacgtttaacggcaaagttgacgtgatcggtggcggcaaaatccccaaatttcttggtcagttctttcgcttcgatcaccgtctcgccgggtgtgccttctaccgtatgtaatattgcgcccagcgggctttcgctggttccggcaccgcccagcaaatcaataaacgcatcttcaaaacgcggcgtagtttcgttgatgttgatttccggcatcccgtcggcatggcgaatatcgtctggtgtggcctcttttttgaggatcagacgtacgcttttcccctgaatcatgccgtcgctgacctgcggcagtttcaaggcgcgttgcaacagtttgcggttgccctcgtgtggactggtcatcagaaagctgcgtccggccatggtttgtgtcagggcttttggttctccctgatacagcaactcgccttcgttcatcagtaacacgtcacggcactgctcggcttcgtcgagatagctggtactccagaggattaacatcccttcgcccgccagctcatgcaccatctgccacagttcgcgccgactgatagggtcaacgccgacgccgggttcatcgagcagcaacactttcggttcgcccaccagggtacaggccagaccgagtttttgtttcatcccaccggagagcttgcccgccaggcgtccggtaaacggcccaagagacgtaaactccagcaggcgagcaaaagtttgcttacgtgcctcgccggtgacgctgcgcaaatccgcgtacagattgaggttctccatcaccgtgagatcttcatacagaccaaatttctgcggcatataaccgagcacggcgtgcagcgcgccgtcgtttttgatcggatcaaagccaatcaccgtggcactgccgctgtcgggtttcagtaatcccgccaacatccgcatcagcgtggttttacctgcaccgtccggccccaccaaccccgtcacataaccggcgtgaatggtacaatcgagcggcgcgacggcgggcttgtccatgcccggaaagcgtttttccaggccgttcagcgtgataacggcatcattcatgtcctgcctcgtcaccgaattgtaccgtcactggcattccctggcgtaacgcatcatcggcgtcggtcaccacaatacgcaggcgatagacgaggtcggtacgcagatccggcgtttcgacggttttcggggtaaattcagcagtcgggctaacgaaaccaatctgcccgtgatacggcttgtccgggcgaccatcggtataaagcagcactttgcgccccggctgggcctggtcaagattacgttcatcaacataagcgcgcacccacaccggacgcgttagactaacggtaaacaccgtgccaccttcattgaggaccgtgcctggctccaccgcgcgcgttaacagcgtgccatcagacggggctatcaacgtactgtcctgtaaattcaactccgcctgcgccagttgcgcctgcgcctgttcgaggctggctttcgcctgagcgatgtcctgttcacggttaccggaacggtactgacgcaatttatcctgtgcacttttcagcgttgcctgcgcctggtcgcggctggagcgggcattttccaggtcatttgcgctaatagtgcggcttttccacaacccttgctggcggttatagaagttctgcgcatagtcataggcggcttgcgcctgtttcaccgctgcggcggcctgagcgatttcttcattgcgatacccggcaagcatcaggtcatactgcgcctgtgccacgctaacacccgctttcgcctgcatcagggcaatctcatacggcttgtgatccagttcgcccagcacctggcccgctttgatagcatcaccttcgtccaccgccaggctttcaacgcgccccccaacacggaaactaagatttaccgtacgaatatccacgttgccatacagcgtcaggccgttatcctggcggctttgataccaccagtagcctccggcaaccacggcggcaagtaccactaccgccaatccgatcacgacaggttttttcatcactacaaactcctttgcgataattacaaactcctttggcttaatccttgcaaaatcaggtcgatatgacaggtcaccgtctggttgatcagttcggtcttttcttcatcgaacgcggtccagccggtacgtaacagaattgtttctttgccaagacggaacgccagaatctcaccaatcaacgcatgggtatgaaggatcatgcgggtgtcattggcgtcgcagccggtccaggcggcaatcaggcgtgtcaggtggctgtgtagcggactaatcacctgttcgtgcaccaggtggtaggctgccgtgggagagagctgctcacgggagataaacttgctgaggttgacggtgtcatcctgggtgagcagcttaatcatgttcctgcaggcgcgaaggatcagttcacggatggcagcccgatcaggctgtggttgcgcgaacaagcgttcggcttcctcggcatgcggacggaactgctcgccaataaaatcggcaatccactgggcgcaggcgaggtacaaatcttctttgctaccgaagtagtaggtgatggcagcgatattctgcccggcctgggcggctatctcgcgagtggtggcgttcattccatattcaccaaactgcgccagtgcggcagcaatcagctgttttttcgcctgttcacccttgattgtcatggcaggattattcatcgcacagtccattcttaatcaaatgattgattaagattatgactccataggggagttgtccagtatggctaagaattttagcaacgccagtcacagggataatttatgcgctgcgtcacaaaaactgctacactccgctccctcatgacattgtggtttttgtcattttccttttcagtatctccctgaaaactacaccggtaacggtcggggcggttcggagtagttatgtctttcgattctttgggtttaagccctgatatcctgcgcgccgttgccgagcagggttaccgtgaacccacccctattcagcagcaggcgatccctgcggtgctggaaggccgcgacctgatggctagcgcccagaccggcaccggcaaaacagcgggctttacgctgccgctgttgcaacacctgatcactcgccagccgcacgccaaagggcgtcgtccggtacgtgcgctcattcttaccccgacccgtgaactggcggcgcagattggcgaaaacgtccgtgattacagcaaatacctgaacattcgtagcctggtggtgtttggtggtgtgagtattaacccgcagatgatgaaactgcgtggcggcgttgatgtgctggtggcaaccccgggacgtttgctggacctggaacatcagaatgcagtgaagctggatcaggttgaaatcctcgtcctcgatgaagctgaccgcatgctcgacatgggctttatccacgatatccgtcgcgtgttaacaaaactacctgcgaagcgccagaacctgttattctccgcgaccttctctgacgatattaaagccctggcggaaaaactgttgcacaacccgctggaaatcgaagtggcacgccgcaataccgcgtctgatcaggtgacccagcacgttcactttgtcgataagaaacgcaaacgcgaattgctgagccacatgattgggaaagggaactggcagcaggtgctggtgtttacccgtaccaaacacggcgctaaccatctggctgaacagctcaataaagatggcatccgtagtgcggcgatccacggcaataaaagccaaggtgcgcgtactcgtgcgctggctgattttaaaagcggcgatattcgtgtactggtggcaactgacatcgctgcgcgcggcctggatattgaagagctgccgcacgtcgtcaactatgaactgccaaacgtacctgaagattatgtccaccgtatcgggcgtaccggtcgtgcggctgctaccggtgaagcgttgagcctggtgtgtgttgatgaacacaaactgctgcgtgatatcgaaaaactgctgaaaaaagagatcccgcgcattgcgattccgggctatgagccggacccgagtatcaaagccgaaccgatccagaacggtcgccagcaacgtggcggcggcggtcgtgggcaaggtggtggtcgcggtcaacagcaaccacgccgtggggaaggtggcgcaaaatctgcaagcgcgaaacctgcagaaaaaccgtctcgccgcctcggcgatgccaaaccggcaggcgaacaacaacgtcgccgccgtccgcgtaaacctgccgctgcgcagtaatcttttatgccgggctatgcccggcatcaggctgatgaacaaacgcaaaactgcctgatgcgctacgcttatcaggcctacgtgaactctgcaatatattgaatttgcatgcttttgtaggccggataaggcgtttacgccgcatccggcatttcacaacaagcacttgtcagcaatttgagaacacgggaaaaaatttatctgttttaccgcccataagccaccgagacgttacttctctatagccaattgttcgcgcaactccattaaaaggtagcccagtcgattcttgcccttaccatgaccaccgtctccccagtaagcatcgttttccgtatgctcaaccagttttgcgggcgcggttgccagcaagagcgcacgcagttctgcatgctgttcgaatttagcgcgaagtgcttttcgcatcacctgttctttgacgctctcccagtttttacgcagaggcttagaacgatcgcgccccatgcgtgcggcgaccataggggaagaaacccgacggatctcttcgcggtatttttcatcaaggaatttttgtgcctgaaaatagtgttcactggtaggccaggttttcccgtcaaccttgatgggccaggcggcaaagttagaaaaatcaccgtagtcatcgctggtgctgtagaaatttatgatggtgtcttgcatgacgtgttggatcctttgtgctcgaacgggcattaaaccgcattatgttggtggttattgcgagccgctttccagaaacagaaaaaccattacccctgaaaaccgaaaaatgccacaatattggctgtttatacagtatttcaggttttctcatggcattaaccgccgcgcttaaagcgcaaattgccgcctggtataaggcgcttcaggaacagatccccgactttattccccgtgcgccgcagcggcagatgattgcggacgtcgccaaaacgctggccggagaagaagggcgacatctggcgattgaagcccccaccggcgttgggaaaacgctctcttatttgattcccggcatcgccattgcccgcgaagagcaaaaaacgctggtggtgagtaccgccaacgtggcattgcaggatcagatttacagcaaagatttaccgctgctgaaaaagatcattcccgatcttaaattcactgccgcttttgggcgtgggcgctacgtttgtccgcgtaatctgacggcgctcgccagtactgaacccacgcaacaggatctgctggcgtttcttgacgacgaactgacgccgaacaatcaggaagagcaaaaacgttgtgcgaagctgaagggcgatctcgatacttataaatgggatggtctgcgcgatcatactgatatcgctatagatgacgatctctggcgtcgtttaagtaccgacaaagccagctgcctcaaccgcaattgttactactatcgtgaatgcccgttttttgtcgctcgtcgggagattcaggaagcggaagtggtggtggcaaaccatgcgctggtgatggcggcgatggaaagcgaagcggtattgcctgacccgaaaaatttactgctggtgctggacgaaggccatcacctgccggatgtggcgcgggatgcgcttgagatgagcgccgaaatcaccgcgccgtggtatcggctacagctggacttgttcacgaaactggtcgctacctgcatggagcagtttcgcccgaagaccatcccaccgctggcgatccctgaacgtttgaatgcgcattgtgaagagttgtatgagcttatcgccagcttaaacaacattctcaatctctacatgcctgccgggcaggaggcagagcaccgttttgcgatgggcgaactgccagatgaagtgctggagatctgccagcggctggcaaaactcaccgagatgctgcgtggcctggcggagttatttcttaacgatttaagtgagaaaaccggcagccatgacattgtacgtctgcatcggttgattttgcagatgaaccgcgcgttggggatgttcgaggcgcaaagcaaactctggcggctggctagcctggcgcaatcttccggtgcaccggtgaccaaatgggcgacgcgggaagagcgcgaagggcagctacacctctggtttcactgcgtgggaatacgtgtcagcgatcagctggaaaggctgctgtggcgcagtattccgcacattattgtcacctccgcaaccttgcgtagcctgaacagttttagccgtttgcaggagatgagtggtctgaaagagaaagcgggcgaccgttttgtggcgctggattccccctttaaccactgcgaacagggcaaaattgttattccccggatgcgcgttgagccttccatcgacaacgaagagcagcatattgccgaaatggcggcctttttccgtaagcaggtggagagcaaaaaacatctcggtatgttggtactgtttgccagcggacgggcgatgcagcgctttctcgactatgtgacggatttacgtctgatgttgctggttcagggcgatcagccgcgttaccgtttagttgaactgcaccgcaaacgcgtcgccaacggtgagcgcagcgtgctggtgggcttacagagttttgccgaagggcttgatttgaaaggtgatctgctcagccaggtgcatatccacaaaatcgcttttccgcccatcgacagcccggtggtgatcaccgaaggggaatggctgaaaagcctcaaccgctatccgtttgaggtgcaaagcctgccgagcgccagctttaacctgattcagcaggttgggcgactgattcgaagccacggttgctggggcgaagtggttatctacgacaaacgcttgctgaccaaaaattatggcaagcgactactggatgcattaccggtatttccgatagagcaaccggaagtccctgaaggtatagttaaaaagaaagaaaaaacgaaatccccacgccgtcggcggcgttaatgatgtgagtcaggtaaggagtcgtaaatggactatcgcaaaatcattaaagagatcgggcgcgggaaaaaccacgcgcgcgatttagaccgggatactgcgcgcggtctgtatgctcatatgctcaatggtgaagtccctgaccttgagttgggcggcgtattgattgcgctgcgtatcaaaggagaaggggaagcagagatgctcggcttttacgaagccatgcaaaatcacaccatcaagctgacgccgccagcaggcaagccgatgccgattgtcatccccagttacaacggcgcgcgtaaacaggccaacctgacgccgttgttggcgattctcctgcacaaactcggttttcctgtggtggttcacggggttagcgaagatccaacccgcgtgctgactgaaaccatttttgaattgatgggtattacgccaacgttgcacggcgggcaggcgcaggcgaagctcgacgaacatcaaccggtgtttatgccagtcggcgcgttttgcccgccgctggaaaaacaactggcgatgcgctggcggatgggcgtgcgtaacagtgcacataccctggcgaaactggcgacgccatttgccgaaggtgaggcgctgcgtctttccagcgttagccatccggaatacattggacgcgtcgcgaagttctttagcgatatcggcgggcgggcgctactaatgcatggtactgaaggtgaagtgtatgctaatccgcagcgctgcccgcagatcaatctcattgaccgtgaagggatgcgggtgctgtatgaaaaacaggacactgctggtagcgagttactgccacaagcaaaagatccggaaaccacggcgcagtggattgagcgttgccttgctggcagcgaaccgattcccgaaagcctgaaaatccagatggcttgctgcctggtggctacgggtgaagcggcaactatcagcgacggcctggcgcgcgttaatcaggcattttaattcttttctcagccggatgagccatgtcatccggcttttaccccaccgcaatatgaaattcctgcatctttattgaccttcccacgcccggcgtgcagcataaaaatacaacaaacacataacataaacaggagttaaccatggaaagtggtcatcgctttgatgctcagacgctgcacagttttattcaggctgtatttcgtcagatgggtagcgaggaacaagaagcgaaattagttgccgatcatttaatcgcggcaaacctggcagggcatgatagtcatggtattggcatgatcccaagctatgtacgctcctggagtcaggggcacctgcaaattaaccatcatgccaaaaccgttaaagaggcgggggcggcggtcacgctcgatggcgatcgcgcatttggtcaggtcgcggcacatgaagcgatggcgctggggattgagaaagcgcatcagcacggtattgccgccgtggcgctacataacagccatcatatcggccgtatcggttactgggcggagcagtgtgcagcggcggggtttgtctctatccactttgttagcgtggtcggtattccaatggtcgcgccgttccacggtcgcgacagccgctttggcaccaatccgttctgtgtggttttccctcgtaaagataatttcccgctgttgcttgattacgccaccagcgccattgcatttggcaaaacccgcgtcgcctggcataaaggcgtccccgtgccgccaggttgcctgattgacgttaacggcgtgccgacgaccaatccggcggtaatgcaggagagcccgttgggtagcctgttgacctttgccgaacataaaggctacgcccttgcagcgatgtgtgaaattcttggcggggcgctttccggcggtaaaacgacgcatcaggaaacgttacaaaccagtcccgatgccattcttaactgcatgaccactatcatcatcaacccggaactcttcggcgcgccggattgtaacgcgcagaccgaagcctttgccgagtgggtgaaagccagcccgcatgatgatgataagccgattttgctaccgggcgagtgggaagtgaacacgcgtcgcgaacggcagaagcaggggattccactggatgcgggaagctggcaggccatttgtgatgcagcgcggcagattggtatgccggaagagacgttgcaggctttctgtcagcagttagccagctaaaaaaaagcccgtccagtggcggacgggcaaacaagggtaacataggatcaatgagggttagagcatatgcgtctgtcggcaaacagacagggaaatacttgtgctggacgtagcgtaaacgcctgatccgtccaacggttcggattttgtaggcctgataagacgcggtagcgtcgcatcaggcatctgttgccggatgcggcgtaaacgccttatccgtcctacgaattacttataaattaccgcagtaccgcttaatttattgttgttggtggcggaagtgatgctgtatccactggcaccggctgccgcggctttctcagccagtttcgcttccagggcatcgagggtggatgcgccatcggcagaaaccacgccgattttattcatgttctgtgcctgggatgccgttaccggttccgccgcgaacacgccaaaactcagagtactaagagccatagcagcaacaacagtattgatagttttcataattaatctctcgcaggtgatttttgtataagtgacgttgtttcgtcgatgtgatgagtatcacgtttttttacgagagataaaatcgaagagaattgaccgccttgttcaaataaattgattgatatctaacctactgataaaccatttatttgttgtacttatgaacttgttttataccgcgtggcagtcacagcagcgttaaaggcacggaatgacacgcaaaatacaaattatactcgctatgcatctcgccagttgtagttaacgtaactggctgtctttgctacctctgcgattatatcctgtataagctggtttttgtaaatctttctcctgctgacaatgaatacataagcgcacgccaggaatggcttcccgacgggcctgcgggatgggggcaccgcactcttcacattcatccaggctttcgccgcgcggaatttcaccccgagcgcgggcaatcgcatcttcaattgtactgttgatctgttcgttgacggcgtcatcgttagcccaaccggatgccatatcgacctccccatatcaatacttgtacagttaagtgtagctaatccagggacgaactcgggcagttcaagcatcagatctcgctccattcccgcagcagattatgataaagattaagcaggctcaggatctcttcactttcgccgtagcggcttttcaggctctgaatattgttgtccagttcaaacagcatggcgcgctttttatcatcgcggatcatgctctggatccacataaaacttgccactcgtacgccgcgggttacgggtgtcacgcaatgcaggctgctggagggatacaacacgagatcgcctgccgggagttttacccgatgttgtccgaaggtgtcattaacgaccagttcgccgccgtcgtagctttgtggatcgcttaaaaacagcgtggcagaaaggtcagtacgcatccagccgttttgtggatggctgcgtactgcgccatccacatggaaaccataggtttcattgttctgatagcgattaaacagcggcgtggaaagggtacgcggcaaggccgcggcaaagaataaagcatgttggttaaccgcgttcagcacctcattttgcagggcggcgtataacgtgctgcgggtgtcgacctgttgattgttcttaacttgcgcaccttgtgcgccggtggtgacgcgtccatccacccattcggcttgttccagttgttcgcgaaaacgagcgacgtcctgtgggcttaacacgccgggaatgtggtacatcatacaatttctccaaaaagtggggcctgcgccccacatctgaatcagaaatgcatattggctgtgagcaagaaggttcttggctcgcccgggtgataacggtagccgctcttgttgatactggcgacgtaatcggtatcaaacaggttgtaaacgtttagctggaagtcgagattgcgattaactcgataccccagtttggcatcggcgacccagtaaccttcggtaaacgctggcgttcccaccgcgccgtcactacctttatgcatactgccgatatagcgtgcgcccgcgccaacagagatatcgtcggttgcctgatattggctccataaggtgaaggcgtgctccggggtatacggcaggctactggaaccatcctgggcaacatctttgccgtttttgatggttgctttttgctgggtatagccgccaatcacctgccacgcgggagtgatattcccggccacggatatctcatagccttcgacgcgtttcttaccgtattggctgtaagttccgtcatcattttgctcaacttcattttcgatatcagtgcggaacagcgcggcggtgagcaacagacgtttatccagaacctgccatttggtgccaatctcgctggtgttggctttttgcggtttaaaatcggtgcggttggcactgttaccgctgccagactgcgcaagggcgaagttgttgccgcccggaggctgctgggaaacggcatagttaatatagacattgccgttttccgtcaggtgatacagcgccccggctttccagttcatcagattgccgctcttggcggtgtcgacggtggtgaccggagaaccttttgccacaccagttgggcaggtgatggcaccgcgtccgctgccgccgcaggcggtggcactgtcatattcagtatgataattatccagacggatcccgccgttcagctcaaaatcacgggtgatttgcagcgtatcaaaggcgtaaattgcgaaggtatccgtctgaccattggcgtttgcgccgttgcgcgtcaggccgccgggatgaatgctgctgtcaggatgataaatatttaccgcgggtaacgtcaccggattaacgccgtagttagtctgcgtttcacgggtaaattccacgccggtactgacatcatgaccgatagaaccggtatagaacgtgctggtcaggttggtctggttggtgagaattttattactcacatctttggtattcgccgtgcgactccaggtccagctattcacatcgctggtgggctgagtaatattgctcgccccgcccataatcgccgtcatcaggtaatcctgctttacgcggctccaacgggtagtattgcgaatggtggtgttatcgttgatgtcgtgctcaaaacgcatggtggcggtgtcggtggtgctatcgtcgtaatcggaatccgtgccgtaaaagttatgagtatcaacttttccggaatgattcagggccgccgttcccgcagatggggcagaatagcccggcaaaccgatggtcggaatgccgccgtctggcgtgttgtgctgggtgacatgcagataattaagatacaaacgattcgctgtaccaaggccaaaagcgacagaaggggcgacgccgtaacgctcatttttgactttgtcgcgtccggcatcgtgcgttttttcgcccattacattcaggcgcaccgcggtggtatcaccaatgacctgattgacgtccagcgtgccgcggcggaaccaggcgctgccaatactggcggaggcgtcaatgccggaatcattgcgcggctgcttgctgatcatattgatgctgcctgtcggtgcgctgcgcccgtagtcggtgccggacggccctttaatcacttcgacctgctcggtattgaaggtgtcgcggctgacgctgccgatatcgcgaatgccatcaatataaatactgttagaggtatcggcaccacgcatataaatggcgtcgccagtggtggagttaccgttctcacccgcaaaaaacgcacccacgccggggacgtttttgagcgcgtcggtaaggttggttgcgccctgatctttaatcacttgttcagaaattaccgtcatcgtgcgggtagtatccgctaccggacggctgaatttcggatcggcagattgttgtggcgcataaaggctaggcgtacttgcttcgacaaccagcgtgtcatccgcgttagtttgcccttcggcggcgagtgcctgagccacaggcgtgatgccaatacaaagaccggcaaagaacgtgaggctatgaaattgtctggcagggaaattgcgattgttttccattttgcaggtgactttttcttatatgttgaaattttcactgccacgagaaagcctctctgcggatgcgatgccactgttaatcccgtgatagtgctcgtgaaagtgataataattttgataagcattatcacttggagcgattttctatcacccattgcgcgaaaaagaaatacatttatttacattgagttcatatttgatgttttttgattacaaaacagacgaaaactgcatccagaggcgaatgcagttacgttggtggggttatttgtagatggttgcagtaccgaacatctggtcatttccgcctgcggaattaatgacataacctttcgcgccttgttcgcgcgctttttctgccagtttatcctccagatcgcttaggttacttgcgccagttgcgctaacggtaccggcgggccgtagctgaccgctgtccaggttactcatcggttgcgcggcataagccgtgagagagattccgctcaggacggtggcaatcagtagtgtgaggcactttttcataatgacatcctcataaatacaacgggtagtgcctgataagtgtaggtcgcctgcgcgatgcaaatgacgcaaaaaattgacagagatgtgcttattttttgaacgatatatttttacaaaataagacaaatcaatgacatgcataatgctgatttttatgatgaattgccataaaccatagccatgttaaggttttggggaatgataaacgcagccagatatttaccctgtcgcgttatgcgggtatcttacgccgctgcttaaaggagaatgctatgtccgcccagaaaccggggttgcatccgcgcaaccgtcatcacagccgctacgatctcgccacgctttgtcaggtcaatcctgaactcaggcaattcctcacgcttacacccgccggggagcaaagcgtagactttgccaatccgctggcggtgaaggcgctcaataaggcgttgctggcccatttttacgccgtagcgaactgggatatccccgacggttttctctgcccaccagtaccgggccgggcggattatattcatcaccttgccgatttactggcagaagcaagcggaacaattccagcgaatgccagcattctggatatcggcgttggtgcgaactgtatttatccgctgattggcgtacatgaatatggctggcgttttaccggtagtgaaaccagcagccaggcgttaagcagtgcgcaggcgattatcagttctaatccggggcttaaccgcgccattcgtctgcgtcggcaaaaagagagtggggcgatttttaacggcatcatccataaaaacgagcaatacgacgcgaccttgtgtaacccgccattccacgattccgccgctgcggcacgggcaggtagtgagcgtaaacgccgtaacctggggctgaacaaagacgatgcactgaactttggcggccagcaacaggagttgtggtgtgaaggcggtgaagtcacctttatcaaaaagatgattgaagagagcaaaggcttcgcgaagcaggtgatgtggtttacaagtctggtatctcgtggtgaaaacttaccgccgttgtatcgtgccctgacggacgtgggcgcggtgaaggtggttaaaaaagagatggcccaggggcaaaagcagagtcgctttattgcctggacctttatgaacgacgagcagcgccgccgttttgtcaatcgccagcgttaaagcgttggttcccccggcggtaacggttcagccggggtcgcgcccggagcaggcagcacctgataagtctgcactggcgcgcgaacgcccgccaggtcgaaatgttttttcacctggctgtcgagggcaaagcgtaccgtccactgtttgagtggcagcgtggtgaagctaacacgcagtgtaaacgcggtattgcttaagccgacaatcccggcaaaattcggttcaccaataatcagcccgcgaatttcttcgttttccattaattccgctaccgcatctttcagtgcctgattggctttatcagcatcttcatggcgatcaacatcataatttgccaccacgctaccaatgccgcggacaaagttagcaaaggtggttatgctagaccacggaatgatgtgatacgccccggtatcctgtcgtacgcccacggagcgaatgctcatccgttccactgtgccggtcaacggcccgatagtcaccaaatctccagtgttcatgccgttttcaaactgaataaataccccggtgataatatctttcaccagcgtttggctaccaaagctgatagccagacctaatgccccggcacctgccagcaatggcgcgatattgacgccgatttcgctcaacacaatcatgatggtgatggtactgataatcaccgccagcgcgttacgaaacagcgtaagcagggtacgcgtgcgggcgctgggtagcgggcggccatgaatatcgctagccagccggttttcgatcaaactggcgagcaccgtccagccaaccgcgctgaagaaaagaatgagtgcgatacggatcaggatatctacggttttctgccccgcgccgttttgcagccagttccagaaatcgaacaatccccatgcgctcaacagcaacattaccgccacgcagactgtcagaatacgcgccgttttcagcgccgcgctcagccagccattcaaccgtttttgcagctccggatagttacgctgagtatgtgggctgagagtgatggttttcgccagccagcgggaaaacataccggaaacaaacgctgcgataccaataatcgccaggctgcgcaccgttgcacccatcataaatttcaggctgttgcccggatcgaacaagctaaagaaaaacagcacgataaaataggcgcttgccagccagtgccacaccagcgcaaaggcgcggataaacaggctgaaaaaggccaggctatgctccgcgaagttgagcaaatgctgggtaatctcttttttattacgaaagatcaggtacaacgcccagacggtcatgcacagcataatgatgacgttcgccagcgcacctatctgtacattcacctgattagagataatcggcacggccacaatcaggccataacctatcaaactgcttaaccagctcaggcgacgactccagtaacgggcgctctcgtcctgaatcgtgaacgggcgcagctccgccacgtttgggcaaaaaatcaggcgtagtacggctttgaaaaattcaatgagggcaaaggcgttgagaaacaaactttgttggaaagcgatggtgcgactgcctgcattcaggttgtcgcttaatacctggccgacaaataatgtcagggccagtaacagcaggtcgataataaacgccccgataatcatcgccggaagctgcaaccagttactgcgctcacgatttttttgccgcgcccactgacccattttgcgatacagcggcagtgcgcacaggcgaatcagccagtaaaaaccaaacactaataccgctaacatactaaaatgggtcagcgcattgctgaaggtttgtggattaaacggcttatgcggggagccggtgatattgcgataaagttgcccgaagcgggcggaaagggcttcaccataatggcggctgacttcggtgaccttttgcagcacggtttgctcttcgaccagcgtcggcggcactatttttggtaccggttcagcagggggcgtagcggcaacggtgcgcaactggtcgatcaactctttacggctggtgtcattatccagcacatccgccagtgcgccataggccgcttttttttgttcgatatccggttccggggccggttcagtcgtactgtccgttgtcgttgtggttgtaacgccgggtatggataccgcgtgggcaggtgcgcccagcaggcagaagaggatgaacaggatccaccgcatgactcctccagtgagaaaatagagcaaaaagataagtatagatgctggaggaggggcgattttaaatgagaggaatctggtgtgcctccctttcgggtgaaagggaggaagggatattaagcaggttgctgacaacgtgcgggcttttttgccggatgcggcgtgaacgccttatccgtcctacaagttcatgcaattttaataagttgccagatatcctgtaggcctgataagcgtagcgcatcaggcaatgtgtcttattaagagacgtgctgcaaaaattcctgcaagcgctggctcggcgggttcttgatcaacacctgcggattgccatcttccgcaatccggcctttgtcgataaagatcagccggctagctactttctcggcaaaaccgatttcgtgggtcacgatcaccatcgtcatcccttcttcagccagatcctgcataaccttcagcacttcatggcgcagttccgggtcaagagcggaagtcggttcatcaaacagcatcattttcggcttcaccgccagcgcgcgggcaatcgccacacgctgctgttgaccaccagaaagttcggaagggtagtgatgtgcacgttctgccagaccgactttcgccagcagctcacgtgccagtttttccgcctcttctttgttcgcgccacgcacgcgtagcgggccaaacatgacgttttccagcgctgtcagatgcgggaagaggtaaaactgctggaacaccatacctgcttcctggcgaatcaggcgctcgtcaactttcggatcgttaaccttcaggccatcgacaatcagatcgccggaggtgatttcttccagtttgttgatgcagcgcagcagggtgcttttaccggaaccggacggcccgataatcaccacgacttcgccctgggcaatgttcaaatcgatattgtgcagcacctgggttgggccaaagtgcttggagacgtttttaaattcaatcacaggattttcatccttctttccagacgacgcagaataaagctcagcaccagggtaataatcagatagaacaccgccacggcgctccagatctcaagggcgcggaagttaccggcaataatttcttgcccctgacgggtcagttccgccacgccgatcacaataaacaggctggtgtctttaatgctgatgatccactggttacccagcggcggcagcatacgacgcagtgccagcggtaaaatgacgtagcgaatggtttcccaacgactaagaccgagcgccagtcctgcttcacgaaaacctttgtggatagacagcaccgcaccacgcgtgatttccgcaatatacgcgccggagttgatcatgatggtgaccaccgccgcagtaaatgggtcgatgcgtaagtcgttaaacgccatcggcagggcgaaataaataaacatcacctggacgacgataggtgtgccgcggatcacttcaataaagaccagcgcgacgtggttggctatccaacctccgaaggtgcgtgcaaaacctgccagcaatccgattaccagaccgcctgccagaccgaggacgctaatccacagggtcattttggcaccttcaatcagaagcggaatggcaggccagatggcactccagtcaaactgcatatgttgttcctgttaccgtggtgtaaataatcaaattcagggtaattaatggccccggagcgggtttgcgcccctcaccctaatcctctccccataggggagagggaactgccagtgcgttttacaggtgtagcgttattatttcggttcagtaccgaaccattttttgtagatttcgttgtaagttccgttctcgcgcagggttttcaacgcgccgttgactttgtcacgcagctcgtcgctacctttcgggaacgcaataccgtattgctgcgcttccagagagtcacctaccgctttgaactgaccgttaccggcggttttgatgaagtacagaatgtttggcgtatcgtgcagaacggcgtctgcgcggttggtgcccagttccatataggcgttatcgatgttcgggaactgacgcagatctttagttttgatgtttgctttcgcgtaatcaacggagccagtaccgctcttcacagcaaccactttcccgtcgagatctttcacgcttttcacatcgttattgttagctttcaccatcactaacaggccgcttttgtagtagccgtcagagaaatcgatcgcttttttacgctcgtcggtgatggtaatgcccgccagcgccagatcgacgtttttggtttgcagtgccggaatgatcccactgaaatccatcggcttcagttcgtaatccagcttcagctctttagcgatggcagcccacagatcaacgtcaaagcccacatatttatcgccctgtttaaattcaaacggaacgaaggcggtatccgtcgcgacaactaattttttatccgcggcatgagaagaaaccgcaaaagccagggtcagtgcagccagactaacttttaatacagacttcatagcatttccttttttctatccacgggacgatcccctgcgtgacattcacatatatgaaaaaatcgtgccagttttgcaactccttgatttttcgagatgcggcaaaaacgtgatgcacgatttatagggcaataccctgaagatgcaccattctggggcaccaatctggtgcgctaaaattgtgcactcaacacagtgattatttagcgtaaaacctgatgaaaaaacaatctttatgtaacgattgtgtgatgatgtggatacaaaaaatttacttaatcagctggagatagcagatggatgcactaaataagtgcgttgaggtgggctgcaaaacaaaacggcctcctgtcaggaagccgcttttatcgggtactaaagttctgcaccatcagcgatggatttattcgatgttagactcgataaaccacaggaatttatccaggtcgcgagacgcggcggtcaggatatctgcggtgtcgtcatctttcgcttcgccaatcgctttgcgtacgtcattagcgacgattgcgtaacggtcagccagttctttcaggtgatcctgaacgttgtggatgtccagcgggtaacttttcagcggggttttgctgttgataacttgagtggtccccagagctacaccgcccagctgcactgcacgttctgccatggtatccagatgatcgatcagtgcggtgcggaagccatccagcatttcatgtacggcaatgaagttagcgccgcgcatgttccagtgcgcttgtttggtaatcaaagaaagatcaataaactggataacctggcgattcagcaactctactgttgcttttttctcgctgtcggagacatcgttgcgggtataaagcagattggtcgctttacttttaactaatttagcggtactcataatttcatatcctcttgatgttatgtcccagtaattaacgagattaagtatagcaccggctatgtgttccgctattctggctgttcctatcacactaatagtggtaacaagcgtgaaaaacaaaactaataaagattcaatgagttagatatattgataagaacaattcttatttatctgctcgccaggaattttcggaataaatatgcttttgcataattcgatatataaagacggtgtagaggaaaagtagcgagaaattctgcatggttatgcataaccatgcagaaatgtaaatttaattaatgtctaattcttttattttgctctctttgcgtactgtcagcgtagaccccatactagcggcgatgatagcgccgagcgccagtagctgtatgggtgtcagtgtttctccgaggaaaatcatcccggaaacggcagccagcgccggttccatgctcatcagcgtaccaaatgtccgtgttggcaaacgggtgagggcaatcatttccaggctataaggcagagcggtgctgagaatagcgacagccagacccaatggaataacgctccagtgccagagtgcttcaccagcctgaagcgctccaattggcacgaaaattaacgctgcaatcaagctaccaattgccaccgtcgcagggccatgttccgctcctgcgcgttgcccacttaaaatgtaaatagcccaacaagccccggcccccagtgccagcgcacagccggttaaatcgacatgggaaacgtcttgccccagcggtagcaggaaccacagaccaagaaccgccagcacaacccagacgaaatctaccgggcgacgagaagagaacagcgccaccgccagtggtccggtgaactccagcgccaccgcaatacccagcggtactgtctgaatagaaagataaaaaagataattcatcccacccaggctaacgccgtaaaacaacagcggtaaccgttgctctttggcaaagcgcagtcgccatggcttaaagaacgcgatgaggatcagcgttcctaatgccagacgcagcgcagtgacacccggtgcgcccaccagaggaaaaagactcttagctaagctggctccaccctgaatagacgccatggcaacgagcaatatgactattggtaaccagaccggcattttacgtaaactaccaggcatcctttctcccacaaatatctagacttaagtaaagcgtggagtgtactggatatacccaatgctggttgagcatttgttgaaaaaattttcccccgttttgactaaaatgcgccaggattgatggaatcattagtctggtgattaggaataatctggatgaatgacagggaaaacatgcgtaatacttacgcagttctctgaaaaagtgatttaaatttagatggatagcggtgtatggaaacgttctgttacatgaaatggcccgttagacatcacaaatcgcgaagagtttcccattaatttttgatatatttaaaacttaggacttatttgaatcacatttgaggtggttatgaaaaaaattgcatgtcttagtgcactggccgcagttctggctttcaccgcaggtacttccgtagctgcgacttctactgtaactggcggttacgcacagagcgacgctcagggccaaatgaacaaaatgggcggtttcaacctgaaataccgctatgaagaagacaacagcccgctgggtgtgatcggttctttcacttacaccgagaaaagccgtactgcaagctctggtgactacaacaaaaaccagtactacggcatcactgctggtccggcttaccgcattaacgactgggcaagcatctacggtgtagtgggtgtgggttatggtaaattccagaccactgaatacccgacctacaaacacgacaccagcgactacggtttctcctacggtgcgggtctgcagttcaacccgatggaaaacgttgctctggacttctcttacgagcagagccgtattcgtagcgttgacgtaggcacctggattgccggtgttggttaccgcttctaatcactttggtgatataaaaaatccgcctctcggggcggatttttgtttttaaggtttcgggtcgaaaatatcggttccgagatggttgtaatccaccttctgtaactggaagttggtgatgtatatcggcccggctttcttctcagatataaacgggtatttgatgttaatttccttcgctttaatccccgtccactgggagaaaaagcctaagaagtcattggcactgcggcgggctttaatcacacgatgcgctttatcgtcgctggaaatgaccataaaaggcacctggaaattttgctgatatttatcatcatgggcaaggtattgcacgtctttaccgcgctctttaaaggccagaccgtggtcagaaaagtaaaccaggctgaagctgctgccgctgttgcgtaactgatcgtacagcttgcgcagtaaatcgtccgtttgcgtcatggtatagagatagcagctcgtttctttgctttgcacaaaggtttcgtattttccttgtgtcctgtcgcaggcctgcggatgactgcccatcagatgtagaacaatcagctgcggttggctgtgctcttgcgccagcacttgagcggtcatatccagtaacgcttcgtctttggtgtttttatctgcttcaaaattaccttctttcaggaagtacacttcatctgctcgtttggcgatgctggcgatagcggtatcgtattcgccgatttgaccctggttggaaaaccaccaggtctggaagcccgcgcgatttgccagggtgacaaagttatcctgaaactgtggtttgccatcgacaacgcgattgagcgttaagccaaggcttttctgcgtggagccactggcggcaatgtagtcagcaaatatcaaaccgttaacgctgctggcaaacggggtattgtcccagtgaccgccaaaggcaccgagggcatcgcgacgcgcgctttcaccgatcaccaccacataggtctgatacttcggcttaacggcagtgaccgtccaggtatctttcattccggaaagttttgccatccgttcttgctcttcaatcacctcgttattattgacgatgacatccttagcaaaacgaaataccggatagccagtatctttcagtttaaatacgccaccccaggccaggttttgcacgggagcaacaaaaaatgtcgccacactgaataccagacacaggctgtcgaaggtattccagcgcgctttttcattctctttttttcgcctgattgctattacgccgagcgcaaaaataaataagccgaccaggtagctgtaccacggaaaaatcgtcaggatttcggtgctctcttccatattggtggagtgcaatgccagcaatgtattgaaattaggcgcgccgtaggcctgagcaaaagggaaataacaagccgccaccaggctactgacaccgaccagaactttttgtacgcgaggcaatgttcgccatagcaaaagcaaaatagccgtaaacgcagcggtgtagagcaaactgaaggggtaacctaagccgaggttaattaataggctctgtaaaaagtagaacgcagtccacgggctaaatacccggctacgggtaacaaggctttctttgagggttaaattcatatgccactatcgtaacaaacgccatgtgcttaccctggcgtcaagggtcaatacctgcaagagtgcgtgaagagtggaaaggggtccgcatccgcgagccgcaatatacgcagggctgcaagaagatagagcgagccgccgtagtggtcaactactgacgaacaaatcttttgcgaaggggattgcaaatccgacaaaaagtggggtttttcagaccaaaacgcgttatgcctgcatgaaagcaggagtgaagcggcgtaccgcgacgccgctatttatcggaaggtttatcttgctgcggtttgttgttgaccatatcgcacaacatagagagcagcattaaccgtactttaaagggagaatgactaaacacgcgcatacacctcttgaactcattcataagacctcctgacttgctaatcccgtcgatccttgaggggtgattgcattacatacagatatagcacaggctatattatatagctattgctaaaacgttaattttttgtaccttcgcaactctggtttacaatgtgcgcacgaaatgagaacgctatgtatgcgtcaccataatgaggaagcacaatgagtcgtcgcgcaggtacgccaacagcaaaaaaagtgacgcagttagtgaacgtggaagagcacgttgaagggttccgccaggtcagagaggcgcatcggcgcgagcttattgatgattacgttgagctgatttctgacttgatcagggaagtgggggaagctcgtcaggtggacatggctgctcgtctgggagttagccaaccgacggtggctaaaatgcttaagcggctggcaaccatggggctgattgaaatgatcccctggcgtggcgtgtttttaacggcagaaggagagaagctggcgcaggaaagccgcgagcgacatcagatagtcgaaaatttcttgttggtgttgggcgtcagtccggaaatcgcccgtcgcgacgcggaaggcatggagcaccatgttagtgaagagacgctcgacgcttttcgtttgtttacccagaaacacggtgccaaatgagcctgccttttttacgcacgctgcaaggcgatcgtttttttcagttattaattcttgttggtatcggattaagctttttcgtgccctttgcaccgaaatcctggcctgctgctatcgactggcacaccatcatcaccttaagcggcctgatgctgctgaccaaaggtgtggagttaagcggttattttgatgtgctggggcgcaaaatggtgcgccgctttgctacggagcgtcggctggcgatgtttatggtgctggcggcggcgctgctttctacctttctgaccaacgatgtcgcgctgtttattgttgttccgctgactatcacgctaaaaagactgtgtgagatcccggttaatcggctgattatttttgaggcgctggcagtcaacgctggtagcctactgacgccaattggcaacccgcaaaatattcttatctggggacgttctggtcttagctttgccggatttattgcccaaatggcaccgctggctggcgcaatgatgctgacgctcctgctcctgtgctggtgttgtttccctggaaaggcgatgcaataccatacgggggtgcaaacaccggagtggaaaccgcggctggtgtggagttgtctggggctgtatatcgtctttctgacggcgctggagttcaaacaagagctgtggggactggtgattgtggcggcaggctttgcgctgctggcacgtcgcgtggtgctcagtgtggactggacgctgctgctggtgtttatggcgatgtttatcgacgtccatttactgacccagcttccagcgttgcaaggcgtgttgggtaacgtgagtcatctatctgaacccgggttatggttaacggcaatcggtttaagccaggtgatcagtaacgtgccgagtaccatattgttgctgaactatgtgccgccgtctttattactggtatgggcggtaaacgtaggtggctttgggttattacccggaagcctggcaaatttgattgcgctacgtatggcgaacgatcgccgcatctggtggcgtttccatctctatagtataccgatgctgttgtgggcggcgttggtgggatatgttttgttagttatactcccggccaactaaggtctggcaaataaaaaaggcggattatgagtccgccttttgctttaagttttgaagattaattcagacgaaccggcatcccggagcggtttttaatcgcttcatcaagaacaacctggtcaacatctggctgaccggtcactgtctgcacgctcttcgtcagggtaattggcacaatttcctgaccttcaaactgggcttcggtggtagacagcgggttatggacttcaatataacggctgccgtctggctcggtggtcgcttttaccggctcatcaataaactgtacgcgggtaccgaccggtactttctcgaacaggaatttgatgtcttcgttacgcagacgcacacaaccatgacttacacgcaggccgataccgaagttggcgttggtgccatggatagcatacaggcgaccgatatagagtgcatacagccccatcgggttatccggacctgccggaacgacagccggaagcggttcgcccgcagcgcggtactctgcgtgcattttggcggtcggcgtccaggtcgggcctgcttttttacgctcaactttggtggtccagttgataggcgtatctttgcctaactgaccaatgccgatcggcagcacgataacggtgttggtccctttcggatagtaataaagacgcatctcagcactgttaatgacgatgccttcatgaacggtatccggcaggatcagctgctgcggaatgttcagtacagtaccgcctttcggcaggaaggtatccacacccgggttcgcttccatcatattggaaagccccatctggtactcggcggcaaaatactccagcggctgagtgttaccttcaggaatggtgatcacctgattctgaccaaccaggcgactcccgtcggttggcagaggataagttaccgcagaggcggtactgcaaaagccgacaacagcgaaggccgctgcgaataatgttttcaatttcatattcatgttaagcgagattttgtgcctggcaggccattgggttgagaatattagagtattggaagcgcattataagttcattccagctcacagtgaaatcagatgtgtacgaaatcacattttttgcctttggcttgagtgtagaccttaagcgaggagcaggatcttctttcagacttatggcataatgcgcggtttgtcatatctcttttcaggatacgcctgtgttagtttccagtaacgtcaccatgcagttcggcagtaagccgttgtttgaaaacatttccgtcaaatttggcggcggcaaccgttacggcctgattggcgcgaacggtagtggtaaatccacctttatgaagatcctcggcggcgaccttgagccgacgctgggtaacgtttccctcgatcccaacgagcgcattggtaaactgcgtcaggatcagtttgcctttgaagagttcactgtgctggatacggtgatcatggggcataaagagttgtgggaagtgaagcaggagcgcgaccgcatctatgctttgccggaaatgagtgaagaagacggctataaagtggccgatctggaagttaaatacggcgaaatggacggttactctgcggaagctcgcgccggtgaactgttgcttggcgtgggaattccagtggaacagcactacggcccgatgagtgaagttgctcctggctggaagctgcgtgtgcttctggcgcaggcgctgtttgctgatccggatattctcctgctcgacgaaccgaccaacaacctcgacatcgacaccattcgctggctggaacaggtgctgaacgagcgtgacagcaccatgatcatcatcagccacgaccgtcacttccttaacatggtctgtacccacatggcggatctggattacggcgagctgcgcgtttatccgggtaactacgatgagtacatgacggcggcgacccaggcgcgtgaacgtctgctggccgataacgccaagaagaaagcgcagattgctgagttgcaatctttcgttagccgctttagcgccaacgccagcaaatctcgccaggcaactagccgcgcgcgccagattgataaaatcaaactggaagaggtgaaagcctccagccgtcagaacccgttcatccgttttgaacaggataagaaactgttccgtaacgcgctggaagtggaaggtctgaccaaagggtttgataacggtccgctgtttaaaaatctcaacctgctgctggaagtgggtgaaaaactggcggtactgggtaccaacggcgtcggtaaaagtacgctgctgaaaacgctggtgggcgatctgcaaccggacagcggcaccgtaaaatggtctgagaacgcgcgcattggttactatgctcaggaccacgaatatgagtttgaaaatgatctgaccgtgttcgaatggatgagccagtggaagcaggaaggcgatgacgagcaggcggtacgcagtattctcggtcgtttgctgttcagccaggacgacatcaaaaagccagctaaagtgctttccggtggggaaaaagggcggatgctgtttggtaagttaatgatgcagaagccgaacattctgatcatggacgaaccgaccaaccacctggatatggaatccattgagagcctgaacatggcactggaactgtatcagggcacgctgatctttgttagtcacgaccgtgagttcgtaagctccctggcgacccgcattctggaaatcaccccggaacgcgtgatcgactttagcggtaattacgaagattacctgcgtagtaaagggatcgagtaagtgattatccgtcaccccgatactgtcggggtgacggcggctgatgacaaatgcaaaatagcctgatgcgctacgcttatcaggcctacgcagtacctgcaatatattgaatctgcaggactttgtaggccggataaggcgttaacgccgcatcaggcattaacaaagcgcatttgtcagcaatctgagtaacgtcgaatcgattttcttaatcccacatcaattcacttccattaattctcaaacatccatgcccaacgctcgcttaccgtgaatgttgaggtcggcaagcgtaaagcgtccttcccagtttgtttcatagtcctcgcgcgggaagtcgcccgggcttgcgcctttttccagtgcggccttcaccttgtgcgcgtaggcaagatttttctcgcacatcggtgccgcaggaatgtacatcacgttgccccaaccttgttgattttcaacgggggcaacggaatggatgacgtcgcagtgccaccagacggagtctccggcttcgagttttggaatgctggttaacgcctcaatcaacagtggatgccattgctcacttaccggcaatactcttccgggcgctacgccgcacagttcatcctccggcacatcatcaagcagcggacgtaacagtacgtacgccatagcttcaggaatgggcacgacgtgcagcagcccctgaccaggcagcatatcagagagcgctgtccagccctggaatgtccgaaacacggaacatttggtggtgttgtccaccgtgtactcttcaacttccgtacgatgtgccgcatgccagggatcatattgcgccagattgccattaaagacgttggcgaaaacgcgctgatacgctggaagcagccagcgttccagtgccccggagtcggtatgcgctccaagacctttggaggtcgttccgggcggacggcggcggatacggtcagggtagatgacgctcacatccgggttaaaccattgctttccatcactttcaaatgtccacagacgattgagaaagctctgcgcattcgccatttcttcactctggcgggcctgcatttgcgcctggctccagtagatggggtaaatctcgggacgactagcgctgagcgtcccgaagaaattatcgccggggcctttgtagacctcgtcaaagcggttgcggtccagatagtccagcatgctctgatcccagcctagcgcttgttcgcgggggaaatggccttttatcaccgcacaaccgcgacgtttaatctgttcgcgctgctctgcagtaacatgacctgctttgatatcggcataagacagcaccggccagacggcatcgccctgtgctttgagtgcgttgatttcagccactcgcgtggcaatgtcatcgcttagctgattaaagatctgctggacgtcgccaagctgcgcccgcagcgcgtgcttcatctgacggatagctgctttgtgatcggcaggcaatgtgtcgctggtaaaagtagaagccataaccacctctcattaactttcattcgaaaccattctgatttgcatgtgacaatataagttataaataagttaatgcaagtttaatgatttgatgtgatgtacaggatgtaaaaagaagggaaaaccggagcgcacggctccggtagagaggtcagctgttaaaaggggatgtgttatccagcaccgcctgaatcacattcagcgcgccttcatgattattatcatcggtagcgtaacgggcgatttgtttaatgttttccgcagcattgcccatcgcaaaggaataacgcgccattttcagcatctccgcatcgttaccgctgtcgccaatcgctaccacattttgcggactcagatcccagcgtttcagtaaccggctaataccgtttgctttatgtagaccgggaataatcaggtcgataaagccaaaaccactggtaacgggtttcataatgccatcgagcgctacgtgcagtttgtcgatcactaacgggatttgttcatccggcaggttgaggctaaacttgaacagtacgtcgtcaatctcctgataatcttttacaggtttcaggcgatggtagtgttttgccatcagtgcgacaaatgcttcgggggcattttcgctgacatatgcactttgcagaccgcaggcgacaaaattgagttgcttatcttttagcaactcgccaataacaatccggctttcatgtcgggtcagttcgccgtggaacaactgcttgccatgttcgtaaaccagtgcgccgttttccgcgacaaaagagatctcatcctttagctcaggaaagaaactaataagctggtaatactgattaccgctggcaacaacgaacttaatgccgcgctttttcagttcctgatattgcgccataaaacgtggttggttgtacgttttggcgtcgttaagaaaagtaccgtccatgtctgtgacgataacttttacgctcataggtgtgctcctggctcgaaaatgaaaccgtaacagtgtaataacaatgtgacgcagagcacaaattatatttcgaatgaaagtaaggatgaaattgatgatgtgaatgatttagcccggcgacgacgccgccgggccgaggagattacagcatatgttcagtacgggcgatgatatcgtcctgagcgtctggagagagcgcggtgaagaacgcggaatagcccgcgacacgcactaccagatcgcgatactgatcgggatgttttttcgcatccagcagcgtttcgcgggaaacgatgttgtactgaatatgccagcctttatgcacttcaaagaaggtacgcagcaggatcatcagtttctgcttgtcagattcgttctccagcgttgccggattcagtttctggttgagcaacacgccgccgagaatcgctgccgtaggcagtttacccacactgccaatgaccgcagtagggccaagatggtcagtaccggaggccgggcttgcgccttctgccagcggggtgtgggctttacgcccgtccggtgttgccatagtctgcgcgccaaacggtacgttagcggagatactactcgtacccgcgtaatagttgccgccaaccggaccacgaccgtagcgcggattatggtactgtttcagttcgtcgatataggtctgataagcgcgagccagcagcgtatcgacagtatcatcgtcgttgccgtacttcggcgcaccgttaatcagccgctgacgcagctgctcgtgagtcaggccgtcgaagtcatctgccagtgcggcagcaagctgttgctgaccaatcgcaccttgttcaaacaccagtttcttcactgccgccaggctgttgccgaggttggcaatgccgacctgcaggccagaaacccagtcatatttcgcgccgccttgcttgatacttttcgctcgctcaatacagtcatccaccagcgcgctgcagagaatatcgtgcacgttctcttccagcatggtgtcgacgacatattcgatttcgatacttttgcgggtgtagtaacggatttgcgtatcccacgcgtccatcacttcatcgaagttgttgaagttacctgcgctcaacgctttttcttgtggcaggaacactttgccgctggtggcatcatgcccgccttccagcgccgccagcatcacgcgggcgaagttgataaagctcatgccggtacagcgatagccccatttgccaccgacggcggtttctatacaaccaatcgctgcgtagtcataagcgtcctgcggttcaataccgagtttaataaattccgggatcacgatttcgtcgttgttgaacgccggcatcccgaagccgcaacggatcacctgtacgcaggcgtcgaggaaatcgttgctcattcctgcatggtaacgcacgctgaggttaggctgagtggaacgcaggcgaccgcaggattcgaggatcgcgtaagagagtggattcaccgcgtccattggttgaccatcaaccagattttgcccgccaatagtgacgttctgatacagcggacttcccgcagaggctttactgtgactgccggagcggatcttgttcacttccagcagtttcagccagcagctatgcagcatctcgatggcgtgttcgcgatccagcgtctggttgagttcaacgtcgcggcgatagtacgggtagagatactggtccatacgaccaaagcttacactgtgaccgttagattcgatctgcaaaatcaactggatgaagtaacacagttgcagcgcctgccagaaagtctgcggcggctggtgggcgataagatcgcagttttctgccatcgccagcagttcatcgcgacggctttcgcgggtttcggtcgcggccatttcacgcgccagggcagcgaaacgttcaatgtgttcactgactgccaccagcacgatatcaatcgctttcaggaattgctcaccgtgtaaatcttccagcaccgtcaggttgatgcggctgcgacgttccgctacttcctcgcgcagaccatcaagccctttttccagcagcagcgggaaattcaccgccaggtgcgcatcgccggaggtcatattgccttccgctttaatgattccggtcgccagcagacctttttgctcatcggtaaacatgccgtagcagcgatcctgtacggtctgaccgcgccaccacgggcacacttcatgcagaacgcgtttgttctcttcgctcaccgcaaagccagcaccgggacgatctgccagatcatcaatctctttttcgatccagctgacagtatattccgggaagatcggcgcggcgcgaacttcgcttgcctggttgccaatgatcaactcatcgtgtttgatccagatggtgcgattcgccaggtgatgcgccagtgccagcgcgcgacgtaccgggatcggcttatcgagatgttgttgatacatctcggtatagtgctgcgcgcgctcggtacagactggcggtttcacaatatgcaccagcgcatttttgtgcgctttaatgcggtcgctgagcgtgtccagtttcagtgtggtcatggttgttatcctcgtaaggtcgcggttaaccctttctggcaggcatactgctgggcaaagtcgagcagttctggcgcatcaagcggtttttccggggcgtcatagggcagattaagtaagtgatatttgttgatgcccagcgtgtggtagggcagaaaatgaatttcgccaacgtgcagctcgtcggcggcaaaatcggtaatggcttttacagaggtttcgtcggcattaaagccctgaatcagcggcacgcggataatgatttttttgcccgctgcggcgagttttttcaggttatccagcactctggcggcgttaccgtcggtccactgtttaaacggcgcgtcggcaacgtgttttaaatcggcaagaaacagatcgatatagggcagagaaggggcgatatatttccacggcacatgcagacaggtttctaccgcagtatgaatgcctgcctcgtggctggcttgcagtagcgccatcgccatttccggctgcataaagggctcaccaccgctaagcgttaaaccgccgccgctgcgatcgtaaaacggtttatcgcgcagaacggtcgtcatgatctcctcaacgcttttcacttcaccacacacggttaatgcctgtgtcggacagcagtcggttaacgccgtcagatgctccggggttaacttttcccgatgaataagcaaaccattcagcgcgcgctcaatcacttccggcgcggccttagcgcacagctcgcagccttccagacacagtcgtgcgtcatacagcagatcctgcgtgcgggcgcggctttccgggttctgacaccagcggcagcccaggctacagcctttaagaaatacgaccgtgcggataccggggccatcatgggtgctgtagcgctgaatattgaaaatcatagttgcctctctatttcgttcaagcattaaaatactttcgaatgaaagttagattgatgtgcgtcaactgttcagagagttttcccgtgatagtctacattcagacaaaaagtacattttgaggatggttatggaactgtatctggatactagtgacgttgttgcggtgaaggcgctgagtcgtatttttccgctggcgggtgtgaccactaacccaagcattatcgccgcgggtaaaaaaccgctggatgttgtgcttccgcaacttcatgaagcgatgggcggtcaggggcgtctgtttgcccaggtaatggctaccactgccgaagggatggttaatgacgcgcttaagctgcgttctattattgcggatatcgtggtgaaagttccggtgaccgccgaggggctggcagctattaagatgttaaaagcggaagggattccgacgctgggaaccgcggtatatggcgcagcacaagggctgctgagcgcgctggcaggtgcggaatatgttgcgccttacgttaatcgtattgatgctcagggcggtagcggcattcagactgtgaccgacttacaccagttattgaaaatgcatgcgccgcaggcgaaagtgctggcagcgagtttcaaaaccccgcgtcaggcgctggactgcttactggcaggatgtgaaagtattactctgccactggatgtggcacaacagatgattagctatccggcggttgatgccgctgtggcgaagtttgagcaggactggcagggagcgtttggcagaacgagcatttaaccggacgttctgcatcctcataaattgctgatgacgtggcggagtgccgcgtcttatcaggcctggaggtggcaattactgcccacacacctcacaccccggattacgcatcagtttcatttcgcgaaactgacaggtcatcgcatcgtacatgacgattttcccgctggccggtttgccataacctgccagcattttgatcgcttccattgcctgcaagctaccaattacgccgatcaacggtgccattacgcctgcttccacgcaggttaatgcattttcaccaaacaaacggctaaggcagcgatagcacggttcaccgtcctgataagtaaagacggtgatttgaccttccatacgaattgccgcgccggaaaccagcggtaccttcgcggcaaaacagcctgcgttcagttgattacgtaccgcaacgttatccgtacagtcgagcaccagatcgtgttcagcaatcaatgctgcaagttctgcgtcatccagcagtgcattgactggcgtaatcgcgatatgtgggttgatccgcgtcagggcgtcacgggcggattccaccttcggttgcccgaccgtggcatcactgtgcagtgtctggcgttgcagattgctgaggctaaccgtgtcgaagtcgagcagcgtcaggttaccgacaccggcgcttgccagatactggctggctgcacagccgaggccgcccaggcccactatcagcacgcgagaatctttcagcgcctcctggccgtcaaaatcaaagccgcgcagaatgatttgccggttgtagcgcagcatctcctgatcgctgagttccgccattacaggcctccgaacaacgcgttaaacggttctacttccacccattcgcccacttccacattgccgcgatcgcgttccagcacgataaagcagttgccgaggctaaaggagctaaatatatgactaccctgatgtccggtggtcgtcacttccagttcgccatcggcgttgcgttgcagcacgccgcgctggaaatcaagacgtcctggcgtttttttcaggcgggacgctgtgcgtacgcgctggcgcgcgggcaggccgctggcggtgttaccgcttagttttgccagcaaaggctgtaccagttgatagaaggtcagcgtcgcactaaccgggttgcccggcaggccgcagaaccagctattgctgagtttaccgaacgcgaacggtttacctggtttaatcgccagcttccagaaggcgatctcccccagctcttcaagaatcgttttggtgtaatccgcctcacccacactaacaccgccggaactgatcaccacatccgcctggctgtcggcttcaataaatgcggcgcgcagggcatggggatcgtcgcggataatccctaagttaattacctcgcatcccaactgttctaacatcaggtgtacggcgagacggttggtatcgtagatttggccgtcgcccagcggctgaccgggcaactggagttcatcaccggtagaaaaaagcgctacacgcactttacgaatcaccggaacttcggcaatccccagactagcaattactggcagctctgcggtagtcaggcgagttcccgccgggaaaacaaccgcacctgcagagatatcttcaccgcgacggcgaatattttgcccgctacgcacttcagcagtaaaacgcacgccattgtccatttgttcagtctgctcctgcatcaccaccgcttcgcagccttccggcaccggcgcaccggtcataatacgaatgcaggtacccgcaggccattcaccatggtatggctgaccggcaaaggatttaccggcaacgggcagcggttgcccggaggcaatatcggctaaacgcaccgcgtagccgtccattgcggagttatcaaaccccggaacatcaagcgggctaacgacatcgctcgccagaatacgaccaaaacactgtaccagtggcagcgtttcctgggcggtcagtggggtgacgcgagaaagcatctcattaagcgcggtgtcgaggctcatcaatccggtggtaaattccatgaaaacactcctgcggaggcaaaatcgaatttgcctattatgtcagaaaaacgccacagactgtatgccacctcgggcgtagcgctgggtcctgcctttacatgccatatccatctttctatattcaaaaattgaatgagtaattcataaaaattctgatatttatagcaaaagtggcgaaccacccttaatggacgaatactatgggcaaagcagtcattgcaattcatggtggcgcaggtgcaattagccgcgcgcagatgagtctgcaacaggaattacgctacatcgaggcgttgtctgccattgttgaaaccgggcagaaaatgctggaagcgggcgaaagtgcgctggatgtggtgacggaagcggtgcgtctgctggaagagtgtccactgtttaacgccggaattggcgctgtctttacgcgtgatgaaacccatgaactggacgcctgtgtgatggatggtaacaccctgaaagccggtgcggtggcgggcgttagtcatctgcgtaatccggttcttgccgcccggctggtgatggagcaaagcccgcatgtgatgatgattggcgaaggggcagaaaattttgcgtttgctcgtggcatggagcgcgtcagcccggagattttctccacgtctttgcgttatgaacaactactggcagcgcgcaaggaaggggcaaccgtcctcgaccatagcggtgcgccactggatgaaaaacagaaaatgggcaccgtgggggccgtggcgttggatttagacggcaatttggcggcagccacgtccacaggcggaatgaccaataaattacccggacgagttggcgatagtcccttagtgggtgccggatgctacgccaataacgccagtgtggcggtttcttgtaccggcacgggcgaagtcttcatccgcgcgctggcggcatatgacatcgccgcgttaatggattacggcggattaagtctcgcggaagcctgcgagcgggtagtaatggaaaaactccctgcgcttggcggtagcggtggcttaatcgctatcgaccatgaagggaatgtcgcgctaccgtttaacaccgaaggaatgtatcgcgcctggggctacgcaggcgatacgccaaccaccggtatctaccgtgaaaaaggggacaccgttgccacacagtgatgaacttgatgccggtaatgtgctggcggttgaaaatctgaatattgcctttatgcaggaccagcagaaaatagctgcggtccgcaatctctcttttagtctgcaacgcggtgagacgctggcaattgttggcgaatccggctccggtaagagtgtgactgcgttggcattgatgcgcctgttggaacaggcgggcggtttagtacagtgcgataaaatgctgttgcagcggcgcagtcgcgaagtgattgaacttagcgagcagaacgctgcacaaatgcgccatgttcgcggtgcggatatggcgatgatatttcaggagccgatgacaagcctgaacccggtatttactgtgggtgaacagattgccgaaagtattcgtctgcatcagaacgccagtcgtgaagaagcgatggtcgaggcgaagcggatgctggatcaggtacgcattcctgaggcacaaaccattcttagtcgttatccgcatcaactctctggcgggatgcgccagcgagtgatgattgcgatggcgctgagttgccgcccggcggtgctgattgccgatgagccaaccaccgcgctggatgtcactattcaggcgcagatcctgcaattaatcaaagtattgcaaaaagagatgagcatgggcgttatctttatcactcacgatatgggcgtggtggcagagattgccgatcgggtactggtgatgtatcagggcgaggcggtggaaacgggtaccgtcgaacagatttttcatgcaccgcaacatccttacacccgtgcgctgttagctgctgttccgcaacttggtgcgatgaaagggttagattatccccgacgtttcccgttgataagccttgaacatccagcgaaacaggccccccccatcgagcagaaaacggtggtggatggcgaacctgttttacgagtgcgtaatcttgtcacccgtttccctttgcgcagcggtttgttgaatcgcgtaacgcgggaagtgcatgccgttgagaaagtcagttttgatctctggcctggcgaaacgctaagcctggtgggcgagtctggcagcggtaaatccactaccgggcgggcgttgctgcgcctggtcgaaagccagggcggcgaaattatctttaacggtcagcgaatcgataccttgagtcccggcaaacttcaggcattacgccgggatattcagtttatttttcaggacccttacgctagcctggacccacgtcagaccatcggtgatagcattatcgaaccgctgcgtgtacacggtttattgccaggtaaagacgcggctgcacgcgttgcgtggttgctggagcgcgtgggcctgttacctgaacatgcctggcgttacccgcatgagttttccggcggtcagcgccagcgcatctgcattgctcgcgcgttggcattgaatccaaaagtgatcattgccgacgaagccgttagcgcgctggatgtttctattcgcgggcagattatcaacttgttgctcgatctccagcgtgatttcggcattgcgtatctgtttatctcccacgatatggcggtggtagagcggattagtcatcgtgtggcggtgatgtatctcgggcaaattgttgaaattggtccacggcgcgcggtcttcgaaaacccgcagcatccttatacgcgtaaattactggcggcagttccggtcgctgaaccgtcccgacaacgaccgcagcgtgtactgctgagcgacgatcttcccagcaatattcatctgcgtggcgaagaggtggcagccgtcagcttgcaatgcgtcgggccggggcattacgtcgcacaaccacaaagtgaatacgcattcatgcgtagataacattcaggcggagaataaaatggcaagagctgtacaccgtagtgggttagtggcgctgggcattgcgacagcgttgatggcatcttgtgcattcgctgccaaagatgtggtggtggcggtaggaagcaatttcaccacgctcgatccgtatgacgcaaatgacacgttatctcaggccgtagcgaaaagcttttaccaggggctgttcggtctggataaagagatgaaactgaaaaacgtgctggcggagagttataccgtttccgatgacggcattacttacaccgtgaaattgcgggaaggcattaaattccaggatggcaccgatttcaacgccgcggcggtgaaagcgaatctggaccgggccagcgatccggcgaatcatcttaaacgctataacctgtataagaatattgctaaaacggaagcgatcgatccgacaacggtaaagattaccctcaaacagccgttcagtgcgtttattaatattcttgcccatccggcgaccgcgatgattagtccggcagcgctggaaaaatatggcaaggagattggtttttatccggtgggaaccggaccgtatgaactggatacctggaatcagaccgattttgtgaaggtgaaaaaattcgcgggttactggcagccaggattgcccaaactggacagcataacctggcgtccggtggcggataacaacacccgcgcggcaatgctgcaaaccggtgaagcgcagtttgctttccccattccttacgagcaggccacactgctggagaaaaacaaaaatatcgagttgatggccagtccgagtattatgcagcgttatatcagtatgaacgtgacgcaaaagccgttcgataacccgaaggtccgtgaggcgctgaattacgccattaaccgtccggcgctggtgaaagttgcctttgcgggctatgcaacgccagctactggtgtggtaccgccaagtatcgcctacgcgcaaagttataaaccgtggccttacgatccagtgaaagcgcgcgaattactgaaagaggcgggatatcccaacggtttcagtaccacgctgtggagcagtcataaccacagcaccgcgcagaaagtgctgcaatttacccagcagcagttagcgcaggtcgggattaaagcccaggtgactgcgatggatgccggacagcgggcggcagaagttgaaggtaaagggcaaaaagagagcggcgtgcggatgttctacactggctggagcgctagtaccggcgaagcggactgggcactaagcccgctgtttgccagccagaactggccaccgacgctgtttaataccgcgttttacagcaataaacaggtggatgacttcctggctcaggcactgaaaactaatgatccggcggaaaagacccgcttatataaggcggcgcaggatatcatctggcaagaaagcccgtggatcccgctggtggtagaaaaactggtgagcgcacacagtaaaaacctgaccggtttttggatcatgccagacaccggcttcagctttgaagacgcggatttgcaataagcaacgcagggagtggaatgcttaattacgttatcaaacgcttactggggttgattccgacgctgtttatcgtcagcgtgctggtgtttttatttgtccatatgctgcccggcgatccggcgcgattgattgccgggcccgaagctgatgcgcaggttatagaactggtgcgtcagcagctggggttggatcagccgctgtatcaccagttctggcactatatcagcaatgctgtgcagggggattttggcctgagcatggtgagccgtcgtccggttgccgatgagattgccagccgctttatgccaacgctgtggctgaccataaccagtatggtctgggcggttatatttggtatggcggcgggaattatcgccgccgtctggcgtaaccgttggccggatcgattgagtatgaccattgcggtgagcgggatcagctttccggcatttgctctggggatgcttttaattcaggtattctccgttgaactgggctggctgcctaccgtgggagcagacagttggcagcactacattttaccctccctgacgctcggcgcggcagtggccgccgtgatggcgcgctttacccgcgcgagctttgtcgatgttttaagcgaagattatatgcgtaccgcgagggcgaaaggggtgagcgaaacctgggttgtcctcaaacacgggctacgtaacgcgatgatcccggtagtgaccatgatgggcttacagtttggctttttgctcggtggttccatcgttgtggagaaagttttcaactggccgggacttggacgcttactcgttgactccgtagaaatgcgtgattacccggtgattcaggcggaaattctgcttttcagcctggaatttattcttatcaacttagtggtggatgtgctttacgccgccattaacccggctatcaggtacaagtaaggatgcgactatttaactggcgacgtcaggcggtgttaaacgccatgccactggtcaaacctgaccaggtacgtacaccgtggcatgaattctggcgacgatttcgccgtcagcatatggcgatgaccgccgcattattcgttattttattgattgtggtggccatttttgcacgctggatcgctccctatgacgccgaaaattattttgattatgacaatctgaataacggaccttctttgcagcactggtttggcgtcgatagtctggggcgtgacattttcagccgtgtcctggttggtgcgcaaatcagcctggcggcgggcgtgtttgccgtgtttatcggtgcggcgatcgggacgttgctgggcttgctcgctggatattatgaaggctggtgggatcggctgatcatgcgcatttgcgatgtgctgtttgccttcccgggtattttactggcgatcgctgttgttgcggtgttgggaagcggcattgctaacgtgattattgcagtcgccattttttccatccccgcgtttgcccgcctggtgcgcggcaacacgctggtgttgaaacagcaaacctttattgagagtgcacgcagtattggtgccagcgatatgaccgttttgttgcgtcatatcctgcctgggaccgtctcttctatcgtggtgtttttcaccatgcgcattggtaccagcattatctctgccgccagcctcagttttctcggcctcggtgcgcagccgccgacaccagagtggggagcaatgctcaatgaggctcgagcggatatggttatcgcgccgcatgtcgctgtttttccggccctggctatttttctgaccgtactggcgttcaatttgttgggcgatggtttacgcgatgcgctggatccgaaaattaaaggataattacgtttgaatattgcttgaaagggtaatcacctcacaggaaattattgccctaagcaagtgttgtaactttctgctgattttgtagaatcgggtaatttggttaaaaagccgcagcaagggacaatttttgcagcggcacagcgttcagatagttattttgttaaatgtattaacatgctgagtttatacgaaaagataaagataaggctgataattttatttttattggcagcactgagttttattggtctttttttcatcattaactatcaactggtaagcgagcgcgcggtaaaacgtgccgatagccgctttgaacttattcagaaaaacgttggctatttctttaaagatattgaacgtagcgccctgacattaaaggacagtctgtatttattaaaaaatacagaggagattcaacgcgccgtgattcttaaaatggaaatgatgccatttttagacagcgtgggactggtacttgatgataataaatattatctttttagccggagggcgaatgataaaatcgttgtttatcatcaggaacaagtaaatggaccgcttgtcgacgagagtgggcgggttatttttgccgattttaacccaagcaaacgaccgtggagcgtggctagtgatgactctaacaacagctggaatccggcatacaattgctttgatcgtccgggtaaaaaatgtatctcttttacgctacacatcaacggcaaagatcacgatttgttagcggtggataaaattcatgtcgatttaaactggcgatatctgaacgagtatcttgatcaaatcagcgctaatgatgaagttctatttttgaaacaaggccatgagatcattgccaagaatcaactcgctcgtgaaaaactgattatttataatagcgaaggtaattataatattattgattctgtcgatactgaatatatcgaaaaaacaagtgcggtgccaaacaacgcattattcgaaatctatttttattatcctggcggtaatttattgaacgcaagtgataaacttttttatctgccgtttgcgttcattattatcgtattgctggtggtttatttaatgaccactcgtgtgttccgtcggcaattttctgaaatgacagagctggttaatacgctggcgtttttgcctgacagtacggatcaaatcgaggctctgaaaattcgtgaaggcgatgcgaaagagattatcagcatcaaaaatagcatcgcggaaatgaaagatgccgaaattgaacggagtaataaattgctcagtctgatctcttacgatcaggaaagtggttttattaaaaatatggcgattattgagtctaacaataatcagtatctggctgtggggatcatcaaactgtgtggtctggaagccgtggaagcggtgtttggtgttgatgagcgcaataaaatcgtcaggaaattgtgtcagcgaattgccgagaaatatgcgcaatgctgcgatatcgtgacattcaatgccgatctctatttacttctgtgtcgggaaaatgtacagacatttacccgtaaaatagcgatggtaaacgattttgacagcagctttggctaccgcaatctgcgcatccataagtctgccatttgtgaacctttgcagggggaaaacgcctggagttacgcagaaaaactgaaactggcgatttccagtatccgtgaccatatgttcagtgagtttattttctgtgatgacgcgaaactcaacgaaatagaagagaatatctggattgcgcgtaatattcgccatgcaatggaaattggcgaactattcctcgtctatcaaccgatcgttgatattaacacccgcgccattctgggcgcggaggcgttgtgccgttgggtgtctgcggagcgggggatcattagtccgctgaagttcattaccattgctgaagatatcgggtttatcaatgagctgggttatcagattattaaaacggcaatgggtgaattcagacattttagtcagcgtgcgagcctgaaggatgatttcttactgcatattaatgttagcccctggcagttaaacgaaccacactttcatgagcgttttaccaccatcatgaaagaaaatggcctgaaggcgaacagcctctgtgttgagatcactgaaaccgtgatcgagcgaattaatgaacatttttatctcaatattgaacaactgcgtaaacaaggggtacggataagcattgatgactttggcaccggtttgagtaacctgaaacgtttttatgaaattaatccagacagcataaaggtggacagccaattcaccggcgatattttcggtactgcgggaaaaattgtgcgcattattttcgacctggcacgctataaccggatcccggtgattgcggaaggcgtagagagcgaagacgttgcgcgcgaattaatcaaattaggatgtgttcaggctcaggggtatctgtaccagaaacccatgccattctccgcctgggataaaagtggaaaattagtaaaagagtaatttacgtatgtccagaatcaataagttcgtacttacagtcagtctgctgatttttatcatgattagtgcagttgcctgcgggatctacactcaaatggtaaaggaacgggtgtatagcctgaaacagtccgttattgatactgcttttgcggtggcaaatattgctgaatatcggcgtagcgtggcaattgatcttatcaacacgctaaatcccacggaggaacagctgttggttggtttgcgcacagcttacgccgacagcgtttccccctcttatttgtacgatgtcggtccttatctgatttccagtgacgaatgtattcaggtaaaggagttcgagaaaaattattgtgcagatattatgcaggttgtgaagtatcgacatgtcaaaaatacagggtttatctcttttgacggtaaaaccttcgtctattacctctatccggtaactcacaatcgtagtctgatatttttgcttggtctggagcgtttttctttactgagtaaaagcctggcgatggacagcgagaacctgatgttctctctatttaagaacggtaaaccggtgaccggtgatgaatataatgctaaaaacgccatcttcaccgttagcgaagcgatggagcacttcgcctatttgccgaccggattgtatgtatttgcgtataaaaaagatgtttatttgcgggtttgtacattgattattttctttgccgcattggtggcagtgataagcggtgccagttgcctctatctggtacgcagagtgattaatcgtggtattgtggagaaagaagccatcattaataaccattttgaacgcgtactggatggcgggcttttctttagcgctgccgatgtcaaaaaactctacagtatgtataacagcgcgttcctggacgacctgaccaaagcaatgggcagaaaatcctttgacgaagatttaaaagcgctgccggaaaaaggcggttatttgtgcctgtttgacgtcgataaattcaaaaacattaacgacaccttcggtcatttgctgggcgatgaagtgttgatgaaagtggtgaaaatccttaaaagtcagatcccggtagataaaggtaaagtctaccgcttcggcggtgacgaatttgcggtgatttatacgggtggaacgctggaagagttgctaagcattctaaaagaaatcgttcatttccaggtgggaagcattaatttaagtaccagtatcggtgtagcacatagtaatgaatgtcctaccgtcgaacgcttgaaaatgctggcggatgagcggctgtataagagtaagaaaaacggcagggcacagattagctggcagtaatcattattcgcaggccggacaaatgattttgcccggcctgaattaattaaacccggctaccccacaaatcgtactcatcggcgtgctcgactttcacacgcaggatatcacccggcttaacgttggtttcaccattgagataaaccgcgccgtcgatttccggtgcatctgccatgctgcgaccaatcgcgccttcttcgtccacttcgtcgataatcaccagaatttcacggcccactttctcttgcaggcgctcggcggaaatctgctgctgcagctgcatgaaacggttccagcgttcttctttaacttcttccggaacctggtcaggcagggcattggcgtctgcaccttcaaccgggctgtatttaaagcagccaacgcgatccagacgcgcttctttcaggaagtcgagtagcatctggaaatcttcttctgtctcgccagggaagccgacaataaaggtactgcgtagggtcagttccgggcagatttcgcgccactgtttgatgcgcgccagttggcgatctacagaacccggacgcttcatcagtttgagaatgcgcgggctggcgtgctgcaacggaatgtccagatacggcaggattttgccttctgccatcagtgggatgacgtcgtccacatgcggataagggtaaacgtagtgcagacgtgtccagatccccagtttgcttaactgttcgcacaggctgaccatgctggtttttaccggctcgccgttgtggaagccagtacgatgtttaacatcaacgccataggcggaagtatcctggctgatcaccagaatctctttaacgcccgcatctaccagacgtttcgcttcacttaacacttcgccaatcggacggctcaccaggtcgccgcgcatagacggaataatgcagaaggtgcagcggtgattacagccttcagaaattttcagataggcataatgacgcggcgtcagtttcacaccttgttctggcaccaggctcaggaatgggttgtgtttcggttttggcacgtagtgatgaacgtgctccagaacctgctcatagctatgaggcccggtgatttccagcactttcgggtggacttcgcggatctgatcttcttttgcccccagacaaccggtcacaataaccttgccgttttcattcaacgcttcaccaatggcttccagactttcttgtaccgcgctgtcaataaagccgcaggtgttgacgatcaccatgtccgcatcgtcatagctcggtaccacgtcataaccttcagtgcggagttcggtgagaatacgctcactatcaacaaggtttttcggacagccaagggaaacaaagccgattttcggctggggagttactttgctcatagcttaaaaaatattcagttacaggaaaggtcagggcagggattctacagagttctggataaaatttgtatcgcaatctcattcgctggcggaggcgaaggaaatgtaaattttgttaattcggcgtgaagaattgatcctggacagcattttgctcaaaaaatagccatactatttaattgcaacaaggctgggaagaggaggatcgaagtatgttcgttgacagacagcgaatcgatctgctgaaccggttgatcgacgcacgcgttgacctcgccgcatacgtgcaactgaggaaggcaaaaggatacatgtccgtcagcgaaagcaatcatctacgagataacttttttaaactgaatcgcgaactgcacgataaaagcctgcggttgaatcttcatctggatcaggaagagtggagtgctcttcatcatgctgaagaagcattagcgacagccgcagtatgtttgatgagtgggcaccatgattgcccgactgttattaccgtcaacgccgataagcttgaaaattgtctgatgagcttaacgctgagtatccagagcctgcagaagcacgccatgcttgagaaggcctgaaaactaagggggagaaagcgtctcccccttcatgtttaagtttttgtaaaaatgaatttgttatctcctccactgactacgctttaagccagagtcaatccggaggcgttatgcatcgacaatcctttttccttgtgccccttatttgtctttcttccgctctctgggcggctcctgcaacggtaaatgtcgaagtactgcaagacaaactcgaccatccctgggcactggcctttttacccgataatcacggtatgttaatcactctgcgcggcggcgagttgcgtcactggcaagcaggaaaaggattatctgcgccgctttccggagttccggacgtttgggcgcacgggcagggcggcctgctggacgtggttttagcgcctgattttgctcagtctcgccgcatctggttaagttattccgaagttggcgatgatggcaaagccggaactgctgtgggttatggccgcttaagtgatgatctcagtaaagtgaccgacttccgcaccgtctttcgccagatgccaaaactgtctaccggcaaccattttggcgggcggctggtattcgacggtaaaggttatctttttattgctctgggcgaaaacaatcagcgcccgacggcgcaggatctggataaattacagggcaaactggtgcgtctgaccgaccagggcgaaatcccggatgataatccttttataaaggaatccggtgcgcgcgccgagatctggtcttatggcattcgtaatccgcaaggaatggcgatgaatccgtggagtaatgcactgtggctgaatgaacatggcccgcgcggtggtgatgaaattaatatcccgcaaaaaggcaaaaactacggctggccgctggcaacctggggaatcaactatagtggctttaagataccggaagcgaaaggggagatcgtcgccgggaccgagcaacctgttttttactggaaagatagccccgctgtgagcggcatggccttctataacagcgataaattcccccagtggcagcaaaaattatttattggcgcgctgaaagataaagatgtcattgtgatgagcgtcaacggcgacaaagtgacagaagatggccgtattttaacggacagagggcagcgaattcgtgatgttcgcactggacccgacggttatttatacgttctcaccgacgagtccagtggggaattacttaaagttagcccacgcaattaactaacgggaatcatcaccactttgcgcactgcggggcgttcagtgagttgctgataccagcgttgcagatttggacgcggtgtccaggtcaggccaacgttaaacaaattgtagatgaacggtgcgatagcgatatcgcccacaccaaactcgtcgccagagaaccattttacttttgccagttccgcatcgagcagggcaaacagggcgtcgcactctttgcaactggcatcaatggcggcctgatcgcgctcttccggtggtgttctgactaatcccatcaggatcccgcgatgagcattactgagcgtctggtttgcccagtccatccatttttccgcttccgcacgacgtgccggactgtcgatccacaggcgtttttgcccgtactgtgccgccagatagcggacaatggcgttactttcccaaagaatgagatcactttcgtcgtcacgcaacaacggcaccagcccgttagggttcatcgccagaaaatcagcatcgtgatttatcccaaactcacggcccgcgagaatttgctcataaggtagttccagttcttcgagcgtcagcaatactttttttacgttagtactattattccgaccccacagcgtaatcatactcaccccttttccgacaggcagccacaggctgaacaggactccgatggtgaagtaaagttaacttttaagcaacagctggcaaaaaaatgacaccagaagcagcgaagcggcaggatattgcataaactttaaaaactttaccaacttacggtttctttaagtttgtgtgtgcgttattaatcaccaaacttatcatacggcgatataacgtattttttttgaatggatactcgggtggcatttatgacgcaatactcctctctccttcgtggtcttgcagcgggttctgcatttttattcctttttgccccaacggcattcgcggcggaacaaaccgttgaagcgccgagcgtggatgcgcgtgcatggattttaatggattacgccagcggtaaagtgctggcagaaggcaatgcggatgagaaactggatcccgcgagcctgactaaaatcatgaccagctatgtggttgggcaggcgcttaaggccgataagattaaactcaccgatatggtgacggtcggtaaagatgcctgggcgacgggaaatccggcactgcgtggtagtagcgtaatgttcctcaaaccgggcgatcaggttagcgtggcagacttgaacaaaggtgtgattatccagtccggtaatgacgcctgtattgcgctggctgattacgttgccgggagccaggagagttttattggtctgatgaatggttatgccaaaaaactgggtctgaccaacactaccttccagacggtgcacggcctggatgcgccggggcagttcagcaccgcgcgcgatatggcattgctgggtaaagcattgatccacgatgtgccggaagagtacgccattcataaagagaaagagttcaccttcaacaaaattcgtcagcctaaccgtaaccgtctgctgtggagcagcaatctgaatgttgatggcatgaagacaggaaccacggcaggcgcgggatataatctggttgctagcgctacccagggcgatatgcgtttaatctccgtagtgttgggggcgaaaaccgaccgtatccgttttaatgagtctgagaaattattgacctggggtttccgcttctttgaaaccgtgacgccaattaaacctgatgccacctttgtgactcagcgcgtctggtttggtgataagagcgaagtgaatctcggggcaggtgaagcgggcagtgtgaccataccgcgtgggcagctgaaaaacctgaaagcgagttatacgttaacggaaccgcagcttaccgcaccgctgaaaaaaggtcaggttgtcgggaccattgatttccagcttaacggtaaatccattgagcagcgtccgctgatcgtgatggaaaatgtggaagagggcggattctttggtcgggtgtgggatttcgtgatgatgaaattccatcagtggttcggcagctggttctcttaatcttctgataaccggatggcgcgaaacgtcatccggttatacgtcattaatacatcaacttaatgcgctgcgtctgcgcgtacttcacatactcatcttccgggcaacaatcgctcaccacaatatcaaagcgtttcaggtcacccatgcgcgccggacgcaccttgccaaatttactgtggtcgacaaccagcacatgcttttgcgccatgctcatggcccagtgttttaccggcaactcttcaagattaaaacaggtagcgcctttactgacatgcacgcccgccgcagaataaaaagcgatatccgggcaaaaattattcagcgtttgctgaaaatcgatgggtttgaaaatggcgttgctggcgtgaaattcaccaccgcaaagaaacgcgcggcaatggggtttctctttcagcgccagaaaggtatttaggctataacaaacggcggtaaaagggatttcattatcaatcgcttcaataatccacggcgtggtggtgccacagtcaaaaaagagggtctgatcgggttctaccagcgtcgcagccagttttgccgcccggcgtttttcttccaccaggcgggatttttgatcgcttaacaggtaatggctggcactgcgcggttccagaacaatatagccgccgagcaaaacgacgggcgcactgtggttgttcagatcgcgacgaatcgtcatctcgctaaccccaagcagggcggcggcgtctttaagatgtaacttatcgctgcgttttaattcttgcagcagctgcccgatacgctcttcgcgacgtgtttccataatccctctgaatagttattgaagcgagccgctcaatactacactttttagcagagatcagtcacgcacccagcctttgcggatcggtaatgcaaaacagacgcgataccagctttgcagacgttgatagagtttatgccccatcgcttgccagataatctgggcactaaggcagccaatcatacctgccagcaatccaccgagcatatccagcggccagtggacgccaagataaacgcggctccaggcaatgacgacggccagcaccattaaaagactgccggaccacaggcgatgccagcataaaaatgccagtgcaaaggtgaaaatcaccgtaccgtgatcgcttgggaaactgtcatccgccgcatgatgcaggaagttatagccgatattttcgacaaagggtcggtcgtgcggaaaaagatgtcccatcgtccaggacacaaacaggctgaccgccagcgcgatagcgatttttatcaccagttgccgttgtgctgtaagcccccacaaccaaagtaccacggccagcaacggcaccacggtaatcaaatctttagcaataaaaatcgccaagctgatcatccacggagcgctgtctggcgtcgcgttaataagagagaatagagagagattcaaattttccagcataacttcccgacgcaaagtgattaaaagggagccaatacaggcaagtcgttgagaataaagtgcaggttaaactgggtaaagcggcatcgtcttatttccctcaagcggcctgtttacggtgggtgattgtaacgggcataggttaaataaaacttaaagaaagcgtagctatactcgtaataatgtaagaatgtgcttaaccgtggtttcagctacaaaattcgctttctcgttagctgcgcttttattaaactctgcgcgattattattggcgaagaaattgcatgcaaaataaattagcttccggtgccaggcttggacgtcaggcgttacttttccctctctgtctggtgctttacgaatttagtacctatatcggcaacgatatgattcaacccggtatgttggccgtggtggaacaatatcaggcgggcattgattgggttcctactagcatgaccgcgtatctggcgggcgggatgtttttacaatggctgctggggccgctgagcgatcgtattggtcgccgtccggtgatgctggcgggagtggtgtggtttatcgtcacctgtctggcaatattgctggcgcaaaacattgaacaattcaccctgttgcgcttcttgcagggcataagcctctgtttcattggcgctgtgggatacgccgcaattcaggaatccttcgaagaggcggtttgtatcaagatcaccgcgctgatggcgaacgtggcgctgattgctccgctacttggtccgctggtgggcgcggcgtggatccatgtgctgccctgggaggggatgtttgttttgtttgccgcattggcagcgatctcctttttcggtctgcaacgagccatgcctgaaaccgccacgcgtataggcgagaaactgagtctgaaagaactcggtcgtgactataagctggtgctgaagaacggccgctttgtggcgggggcgctggcgctgggattcgttagtctgccgttgctggcgtggatcgcccagagcccgattatcatcattaccggcgagcagttgagcagctatgaatatggcttgctgcaagtgcctattttcggggcgttaattgcgggtaacttgctgttagcgcgtctgaccagccgccgcaccgtacgtagcctgattattatgggcggctggccgattatgattggtctattggtcgctgctgcggcaacggttatcagtagccacgcgtatttatggatgactgccgggttaagtatttatgctttcggtattggtctggcgaatgcgggactggtgcgattaaccctgtttgccagcgatatgagtaaaggtacggtttctgccgcgatgggaatgctgcaaatgctgatctttaccgttggtattgaaatcagcaaacatgcctggctgaacgggggcaacggactgtttaatctcttcaaccttgtcaacggaattttgtggctgagcctgatggttatctttttaaaagataaacagatgggaaattctcacgaagggtaaaaaaatgcctgactgctttgtgcgatcaggcattctcgaattaatggtgatggtcgtcaatctggtgttcgataaccatcccttcacctacgctggcaagatggcgaacataaggatgcgggcggtaagccggagctggcgcaggagccacatagacggtttgcggcacagtcgcgacgctgaccgcttgtggaacgctgacactatcaggaaccacaaccactttgtatccactcggcacatcgacggtgacactttgcgccatcgccacaccagtaaagcccattaaaagcgcgcccaacagtagacaatttttcataatcatttcgcctgaaataatgcagcgggttaatttccgcgaattatgcagccttcattcaggcattgtgttgccgggcgtgctgccggttttattggtcaaatggcgcttcgtgtttaagaactttatcgatcacatccagtacgccttcacggttattggagcctgcgcggtattttgccgctgcgacgaccgcgctaccggcattttccattgcaaaactaaagcctgcctgacgcagcatctcaatatcgttaccgccatcgccaaagaccaccacttcgctgtcgtctattccccataatttctgcagttggcgaaggccattggctttatgtacgccggggataatcagatcgatgctgccgttgccggtgtggacgctcaccataatatcgccgatggcctcatgtaatgctttttgtacttgtggaatcagttcatcggaaagattcaggccaaacttaaagaagatatcctctaagttgtcaaagttatcgacgtattccagacggtgataatacatttccgccaccgttttcatggcatcgtcatattttttgagtgtataggcactattttttccgcaggcaataatttccacttccgggcgcgtcagcaaatgttccacgacagtagcaaacgcatccttgcttagctcgccattaaaaacatctttgccttcgctcactacccagccgccgttttcagccacaaaggcaatttcattagcaatttcagggaagaaagagatcaactgataatattgattcccgctggcgactacaaagcgaattccttgtgctttcatttgctgatactgagccataaaccgctcacggttataggttttttgatcgcttaagaaagtaccatccatgtctaccgcaattaatttaatgctcatcaactattctccatcgccgtctgcgttttggtatcgggtttggcgacggctttcgcgacaatagccgcgagaataaccagcgccagtacaaccagcattgcactacgtaatccataatgttcgccgagatagcccagcagcggcggcccgacgaggaaagccagataaccggtcgttgctaccacactgacgcgggttggtgcatcggggccggtatcgctggcggcagaaatggtcagcgggaagcccaggctggcacccagtccccagagtacaacagacaccccagcgacccaggcgctatcgacaaaaataatcagcccaatacccaacgcccccattagtgcactggcccgaaccacggcaacgcgactgtaacggtcgatgaaccaaccgccggtgaagcgtccaacggtcatccccagggtaaaaccggcataaatcaggctgccggaagtagggctaaaaccgtgaccgtcaaccattaataagggtaaccagtcgttggcagaaccttcggcaaaggccatcgccagcaccacaacacctatcagcagcaactggatatcgcgataaaaaggtacgcctttttcgccatgctgggtgccatcggcagcatttttgcccgtaccgtcagggattgcctgaatggcgatataaataggtgcgatacctaccagcgccgccaataaaatgtgcaccgttgccggaacgccaaaggccgtcagtgccatcccgacacctgcgcctgccagcgtgcccaggctataaaaaccgtgcatcatcggcaaaaccgtcttattcatttctcgctcaacggcagcaccttcaacgtttatcgccacttccgcagaaccaaaacttgccccaaagacgccgagaccaacggcaaagagcagggggcttgtcagccagagtgccagacttaatatcatcatcccgatcaatgcgcaggacatcgtgaccaggatgacattacgtgtcccaaagcgtttcactaaccacgcgctgcagagaataccgctcatgctaccgatgctcagaccaaagagaacaccgcccatttcagcgatgctgacagagagaatatcgcggatagcaggcgtacgggttgcccaggacgccattaacaggcctggcaaaaagaagaacataaacagcgcccaggttcggcgtttcaatgcattacgactagaatttacggtcatagatcacgtcaaaataagaagagggaagacaacattagcaaggttgtgtacatttgtacacaattgcagagagaggaaatgacatgcgtcgcgctaacgatccgcaacggcgagaaaaaattatccaggccacgctggaggcggtgaaactttacggaatacatgctgttacgcaccgcaaaattgctacccttgccggggtaccgttgggaagcatgacctactattttagtggaattgatgagttgttactggaggcgttcagcagttttactgagatcatgtcccggcaatatcaggcattttttagcgatgttagtgatgctccgggcgcatgccaggctatcaccgatatgatctacagcagtcaggttgcaacgccggataacatggagctgatgtaccagctctacgcgctggctagccgaaaaccgctattaaaaacggtaatgcaaaactggatgcagcgcagtcagcaaacgctcgaacaatggtttgaacccggaaccgcccgcgcgcttgatgcgtttattgaggggatgacgctgcattttgtcaccgaccgtaagccgctaagccgcgaggagattttgaggatggttgagagggttgcagggtaatagataagttttagataacaaaaaacccatcaaccttgaaccgaaatggcggggttgatgggctccacaaaatggggacatcaaagaaaagcagtggcactaattaagactgatgccctgcggaaaagttctgcggttgtgcaaaaaaatttcattttcagggcaacttcagttttatcctaatcctggccataccatgacgatgattgtccctgccagcgtcagcaggacgttggcgattgcataggtgcccgcatagcccagcgccgggatgttactgcgagctgtatcactgatgatctccattgccggcgcgcaggtacgtgcgcccatcattgcgccgaacaacagcgcgcggttcattcgcaatacataagcaccgaacaagaaacagataaccacgggcaccagactgacaatcaatccggcaatcaacatctgaccgccaatcgcgcccaggccgttattaataccgctaccggcgctcagaccaacgcctgccataaacaccatcaagccgaactctttcaccatgcttaatgcaccctgcggaatgtaaccgaaggtcgggtggttagcacgcataaagcccagcataattccggcgaataacaacccggcagcgttccccatgccgaaactgaatgtgctgaactggaaggtgatcatcccgatcatcagcccaataacaaagaaggcgcagaatgccagcaggtcagtgacctggctgtgaatgctgataaagccgatgcgatcggcgatggtttttacgcggcgggcatcgccgctgacttgtaaaacgtcacctttgttaagcacgacgttgtcatctatcggcatctcaatctggctacgaatgacgcggttaaggaagcaaccgtgatcggtcaacttcagttgtgcgagacgtttacctacagcgttatggtttttaacgaccacttcttcagtgacgatacgcatgtcgagaaggtcacgatcgaaaacttctttaccgttacggaagctgggatcgagtcgggcatgggcgtcgggatagcctaccaacgctatttcatcgcccatttgtagcacggcatcaccgtctggatttgccagaatcccgttacgtcgaatacgttcaatgtagcagccggtttgtcgataaatacccagttcacgcagatttttgccgtcggtccaggccaccagttccgggccgacgcgataggcgcggatcaccggtaaataaaccttacggttggcatcagtgtccaggccacgttcgcgggcgatttgctgggcgctggtctgtaagtcctgatgctgcaatttcggcaagtaacgcgcaccaacaatcaaactcaccagaccgattaaataggttaaggcatacccgaggctcagattatccagtgccagactgagctgcctgctttccatgccggaatgacgcagtgtatcgccagcaccgaccagaaccggtgtgctcgtcatagagcctgctaacataccggccgtcaggccaatatcccagccaaacagcttacctaaccctaaggcgatcaccagcgcactgccaaccatcaccagtgctaacattaggtaatttttcccatcgcgaaaaaaaatggaaaaaaagttcggtccggcttcgaccccgacgcagaaaataaacagcataaagccaagattaagcgcatcggtgttaatgctgaaatgttgttggcctaataacaggcttacgactaaaacgccaatggaattacccagttggatgctaccaagtcgtaactttccgagacatagcccaagcgcgaggaccacaaataataacagaatgtaattcccatttaacaattcggcgacgtttatattcacggaggctaacttcttgtttactagtaagctgttgaaagaaatggtaatttacgataatgttttttaccagaattcagggcgcagattcattcagcgcacctaaacgatagtaaagtaacaatatattttactagtgtaatcacattaggtatcaacggctatatgaattgcgttggcctatattagcatggaatgcgaagcggctttatcttactgaacgccacactggcgaaaaatgtgttcgatagacgcagtgtcaggaggaacgagtgaaacataaacaacgttgggcgggggcaatctgctgttttgtcctcttcattgtggtgtgcctttttctggcgacgcacatgaaaggcgcttttcgggctgccgggcatcctgaaatcggcttgctatttttcattcttcctggagcagtcgccagcttctttagtcagcgtagagaagtcctgaaacctctgtttggcgcaatgctggcggcaccctgtagcatgctcattatgcggctgttttttagtccgacgcgcagtttctggcaagagctggcatggttactaagcgcggtgttctggtgtgcgctgggggcactgtgtttcttatttatcagtagtttgtttaaaccacagcacagaaaaaatcagtaaagccctcaacgcgagggcttgtcagacgatcaggcgtccagattttctttcacccatgcagcaaaatcggtatagccgccgatatgttgctgatcgacaaaaatctgcggcacggtttctacgggtttacctgccttttgttgtagatcttctttagtgatcccttccgcacgaatatctacatactgatactgaaaatcatcgcgttcattgctcaatttctcagccagatcttttgcacgcacacagtaagggcaaccgctacgaccaaaaataacggtttgcattatttctctcctcatagatttatgcctgtaatgatcacgctaaaatgtattcgctgaaagtaggtttaacctgttgcattaattgctaaaagctataactgttaaacacaatacagtgaaaagttttagactgaaggctcactttgcagagggaagcgtatgcgcgcgatcggtaaattgcctaaaggcgtgttgatactggaatttatcggaatgatgctactggcggtggcgctgctgagcgtaagcgactccctgagcctgcctgagccattttctcggccagaagtgcagattctgatgatttttctcggtgttttgctcatgcttcccgctgcggtggtggttattcttcaggtggcaaaacgtcttgccccacagctgatgaaccgtccaccgcaatatagtcgtagtgaaagagaaaaagataatgacgccaaccattgaacttatttgtggccatcgctccattcgccatttcactgatgaacccatttccgaagcgcagcgtgaggcgattattaacagcgcccgtgcgacgtccagttccagttttttgcagtgcagtagcattattcgcattaccgacaaagcgttacgtgaagaactggtgacgctgaccggcgggcaaaaacacgtagcgcaagcggcggagttctgggtgttctgtgccgactttaaccgccatttacagatctgtccggatgctcagctcggcctggcggaacaactgttgctcggtgtcgttgatacggcaatgatggcgcagaatgcattaatcgcagcggaaagcctgggattgggcggggtatatatcggcggcctgcgcaataatattgaagcggtgacgaaactgcttaaattaccgcagcatgttctgccgctgtttgggctgtgccttggctggcctgcggataatccggatcttaagccgcgtttaccggcctccattttggtgcatgaaaacagctatcaaccgctggataaaggcgcactggcgcagtatgacgagcaactggcggaatattacctcacccgtggcagcaataatcgccgggatacctggagcgatcatatccgccgaacaatcattaaagaaagccgcccatttattctggattatttgcacaaacagggttgggcgacgcgctaaaaccgccacgtcgatgtatgatacgcgggcttttgaccaggtctgacagagaggtgcagggtgaaaattgccatattgtcccgggatggaacgctctatagctgtaagcggctgcgtgaagccgctatacagcgcggtcacctggttgaaattcttgatccgctttcttgctacatgaacataaatcctgcggcgtcttctattcactacaaaggccgcaagttaccccattttgacgcagtgatcccgcgtattggcaccgccattaccttttatgggacggcggcactgcgccagttcgagatgctggggagctatccgctcaatgagagcgtcgccattgcccgggcgcgtgacaaattgcgttccatgcaactgctggcgcgtcagggcatcgacctgcctgtcacgggcattgcgcatagcccggatgataccagcgatttaatcgacatggtcggtggtgcgccgctggtggtcaagttggttgaaggcacgcagggaattggcgtcgtgctggcggagacgcgtcaggcggcggaaagcgtgattgacgctttccgcggtctgaacgcgcatattctggtgcaggaatatatcaaagaggcgcaagggtgcgatatccgctgtctggttgttggcgatgaagtggtcgctgcgattgaacggcgggcgaaagagggcgattttcgttccaatttgcatcgtggcggcgcggcaagcgtcgccagtatcacaccacaggagcgtgaaatcgcgataaaagccgcgcgaacgatggcgctggacgttgctggtgtggatattctgcgtgctaatcgcgggccgttggtgatggaggtgaatgcgagcccggggctggaaggaatagaaaaaaccaccggtatcgacatcgcgggtaaaatgatccgctggatcgaacgccacgctacgacagaatattgcctgaaaacgggtggttaatcgcaatcacattactgatcatggttttgcctgcgctttttgcgtaagctgtgccggtctttttatcgaaagaggttgtacaaaattatgacaagcctggtcgttcctggtctggatacgctgcgtcaatggctcgatgacctggggatgagtttttttgaatgtgataactgtcaggctctgcatctgccccatatgcagaatttcgacggtgtctttgatgccaaaatcgatctgatcgataacacgatcctgttttctgccatggcggaagtccgacctagtgccgtattgccgctggcggcggatttatctgccatcaatgccagtagcctgaccgtgaaagcatttcttgatatgcaggatgataatctgccaaagctggtggtttgccagtctttatccgttatgcagggcgtaacctatgagcagtttgcatggttcgtgcgtcagagcgaagagcagattagcatggtcattcttgaagctaatgcccatcaactgctgttaccgactgatgatgaagggcaaaacaacgttaccgaaaactatttcctccactgataactcctttcgagcacgcagtcgctggtgcagtggctgcgcgctgcaaaattatctgctgtttttaaccttttcttaaagattatttcacttctcttgtgtcgatttggctttatcacatagagcaaatatgcataaaaatttgttaaataccgttttttaatccgagctatagtctcaaaccctggctaaagttattcttgcgatgcttttatatagcgagcagtgctggccgggagaaagttctcttttcttacaccgcgccgataaaaaatatgcacgtttattgcatatctttcagtgtgacaacttttgttcgtttgttaacgaactttcagaaggaaagagatatgaccgccttaaataaaaaatggctaagcggtctggttgcgggtgctctgatggccgtctctgtcggcacgctcgcggctgaacaaaaaacactccacatttataactggtctgattatatcgccccggacacggtggccaattttgaaaaagaaaccggtattaaagtcgtctacgatgttttcgactctaacgaagtactggaaggcaaattaatggccgggagtaccggctttgatctggtggttccatctgccagctttctggagcgccagttgactgcgggagttttccagccgctggacaaaagcaaattgccggagtggaagaatctcgacccggaactgctgaagctggtcgccaaacacgatcccgacaataaatttgctatgccctatatgtgggcgacgaccgggattggctataacgttgataaagttaaagcggtgctgggcgaaaacgcgcccgtcgatagctgggacttgatcctcaaacctgaaaatctggaaaaactgaaaagctgcggtgtctctttcctggatgcgccagaagaagtttttgctaccgtgttgaattatctcggcaaagatcccaacagcactaaagcggatgattacaccggaccggcaacagatctgctgttaaagctgcgcccgaacattcgttatttccatagttctcaatacattaacgacctggcaaacggcgatatttgcgtcgctatcggctgggcaggtgatgtctggcaggcgagtaaccgcgcgaaggaagcgaagaatggcgtgaatgtcagcttcagcattccaaaagaaggggcgatggcgttctttgatgtattcgccatgcctgcggatgccaaaaacaaagacgaagcctatcagttcctgaattacctgctgcgcccggatgtagtagcgcatatttccgaccatgtgttctatgccaacgccaataaagcagccacgccgctggtgagtgcggaagtccgtgagaacccaggtatttatccgcctgcggatgttcgtgcgaagctgttcactctgaaagtgcaggatccgaaaatcgaccgtgtgcgcacccgcgcgtggaccaaagtgaagagcggaaaataatccgcagtcgtagatgccggaggggcgcaccacacccgccggcaattcgcaccattatggtgcgcttgcacacattcaatgccggagagcagccgtgaatgacgctatccctcgcccgcaggcgaaaacccgtaaggcgctgacgccgctattagaaatccgcaacctgaccaaatcctacgatggtcaacatgcggtggatgatgtcagcctgaccatctacaaaggtgaaatcttcgcgctgctgggcgcatccggctgtggcaagtccacgctgctgcgtatgctggcaggtttcgaacaaccttctgccggacagataatgcttgatggcgtcgatttgagtcaggttccgccttacctgcgccccatcaatatgatgtttcagtcttacgcgctgtttccgcatatgaccgtggaacagaacatcgcttttggcctgaaacaggacaaactaccgaaagcggaaattgccagccgggtcaatgagatgctcggcctggtgcatatgcaggagttcgccaaacgcaaaccgcatcagctttccggtggtcagcgacaacgtgtggccctggcccgaagccttgcgaagcgcccgaaactattactgctcgatgagccgatgggcgcgctggataaaaagctgcgtgacaggatgcagcttgaagtggtggatattctggagcgcgtcggtgtgacttgtgtgatggtcacccacgatcaggaagaggcgatgaccatggcggggcgcatcgccattatgaatcgtgggaaatttgtccagattggcgaaccggaagagatctacgagcatccgactacccgctatagcgccgaatttattggcagcgtaaacgtctttgaaggcgtactcaaagagcgtcaggaagatggcctggtgcttgatagcccggggctggtgcatccactgaaagtcgacgcggatgccagcgtggtcgataacgtgccggtacatgtggcgctgcgcccggaaaaaatcatgctttgcgaagagccgcccgccaatggttgtaacttcgcggtgggggaggtgatacacattgcctatctcggcgatcttagcgtgtatcacgttcgtctgaaaagtgggcagatgattagcgcccagctacaaaacgcccatcgtcatcgtaaagggttaccgacctggggcgacgaagtgcgtttgtgctgggaagtggacagctgtgtggtgctgacggtttaaggagcaaagatgagtacacttgaacctgctgcccagagcaaaccgccgggcggatttaagctgtggttgagccagctgcaaatgaagcatgggcgcaaactggtcattgcgttgccatatatctggttgatcttgctgtttctgctgccatttctgattgtctttaaaataagcctggcggagatggcgcgcgctattccaccttataccgaactgatggagtgggctgacgggcaactgtccatcactcttaatctcggtaattttctgcaactgaccgacgatccgctctatttcgatgcttatctccagagcctacaggtggctgcgattagcacattttgctgtttactgatcggctatccgctggcgtgggcggtggcgcacagtaagcctagcacccgtaatattttattactactggtgatcctgccgagctggaccagctttctgatccgcgtttatgcctggatgggaatattaaaaaacaacggtgtgctgaataattttctgctgtggctgggggttatcgatcaaccgctgaccattctgcataccaatctggccgtttatatcggcattgtttacgcttacgtgccgtttatggtactgccgatttataccgcgttgattcgtattgattatagcctggtggaagcagcgctggatctcggtgcacgaccgctgaaaacgttctttactgtgatcgtgccgctgactaaaggtgggattattgccggaagcatgctggtgtttatcccggctgtgggcgagtttgtgatcccggaactgctcggtggcccggacagcatcatgatcgggcgcgtgctatggcaagagtttttcaataaccgcgactggccggtggccagcgcggtagcgatcatcatgttgctgctgctaattgtgccgataatgtggttccacaaacaccagcaaaaaagcgtgggagaacacggatgaataatttaccggtagttcgtagcccctggcggattgtgattttgctgctgggctttacctttctctacgcgccaatgctgatgctggttatctatagctttaacagcagcaagctggtgacggtgtgggccggctggagtacgcgctggtatggtgagttattgcgcgatgacgcgatgatgagtgcggttggtttaagtctgacaattgcggcctgtgcggcgacggcggcggcgatcctcggaactattgcggcggtggtgctggtgcgctttggcaggtttcgcggaagtaatggctttgcctttatgatcaccgcgccgctggtaatgccagatgtcatcacgggcttgagcctgttgttattattcgtcgcgcttgctcatgccattggctggcctgcggaccgcggtatgctcaccatctggctggcgcatgtcactttttgtacggcttatgtggcggtcgttatttctagtagattgcgggaactggatcgcagcatagaagaagcagcgatggatctcggtgcgacgccgctgaaagtgtttttcgtcattacgctaccgatgatcatgcccgcgatcatttctggctggttactggcttttactttgagccttgatgatctggtgatcgccagctttgtttccgggccgggagccaccacgttaccgatgctggtcttttccagcgtgcggatgggggtgaatccggaaatcaacgccctggcaacattgatcctcggcgcggtcggaattgtcggatttatcgcctggtatctgatggctcgcgcagaaaaacagcggatacgcgacatccagcgtgcaagacgtggctgaagacactaaaatttgccaacctggctacataatgccgcgcatgtcgcggcattgttttcatggaagacgaaacgttgggattttttaagaaaacatctagttctcatgctcgcctgaatgtgcctgcgctggtgcaggtggcggcgctcgccattattatgatccgtggcctcgacgtgctgatgattttcaatacgctgggcgtgcgcggtattggcgagttcattcatcgcagcgtacaaacctggagtttaacgctggtctttttaagcagtctggtgctggttttcattgagatctggtgtgcgtttagtctggtgaaagggcgtcgctgggcgcgctggctatatctgctgacacaaatcaccgccgcaagttacttgtgggcggctagcctggggtacggttatccggagctgttcagcattcccggtgaaagtaaacgtgaaatcttccatagcctgatgctgcagaagctgccggatatgctcatcctgatgctgctgttcgttcccagcaccagtcggcggttcttccagttgcaataatgtgtataatcgtcgcccctgatgatgtgaaggtcaatgtatgcagtgcgcactttacgacgcgggtcgctgtcgttcctgtcagtggataatgcagccgattccagagcaactctccgctaaaaccgccgatcttaaaaatctgctcgccgactttccggttgaggaatggtgcgcgccggtgagtggcccggaacaagggtttcgtaataaagccaaaatggtggtgagtggtagcgttgaaaaaccactgctcggtatgctgcatcgcgatggcacaccagaagacctttgtgactgcccgctttatcctgccagttttgcgcccgtttttgcggcgctaaaaccgtttatcgcccgagcggggttaacgccctacaacgtggcgcgtaagcgtggcgaactgaaatacattctgctgactgaaagccagagtgatggaggcatgatgctgcgctttgtactgcgttctgataccaagctggcgcaactgcgtaaggcgctgccgtggttacacgaacaactaccgcagctgaaagttattaccgtcaatattcagccggtacatatggcgattatggaaggggagacggagatctacctgaccgaacaacaggcactggcggagcgttttaatgacgtaccgctgtggatccgtccgcaaagtttcttccagactaatccggcggtcgccagccagttgtacgccaccgcgcgcgactgggtacgacagctgccggttaaacatatgtgggatctgttctgcggtgtggggggctttggtttacactgcgcgacgcctgacatgcagttaaccgggatcgaaattgcaagtgaggccattgcctgtgcaaagcagagtgccgctgaactgggcttaacgcgtttgcaatttcaggcgctggactccactcagtttgccaccgctcagggggatgtgccggagctggtgctggttaacccgccgcgccgcggcattggtaaaccgctgtgtgattatctcagtacgatggcaccgcgttttatcatctactccagctgtaacgcccaaactatggcgaaagatatccgcgaactgcctgggtttcgtattgaacgggtgcagcttttcgatatgttcccgcataccgcgcactatgaagtgctgacgctgctggtgaagcaataaaaaagccgcatgtgcggcttcagattgctgacaaagtgcgcgttgtttatgccggatgcggcgtaaacgccttatccggcctacaaaagcgtgcaaattcaatacattgcatgggccatgtaggcctgataagcgtagcgcatcaggcaattttacctttgtcatcagtctcaagccgcggttgcggctttctgaatcttactgtgggaaccactggtcactgattttttgataagtaccgtcagctttaattgctgccagcgcgttattcagtttttccagcagggctttgttatccggacgtacagcgatgcccaggccggtgccaaaatattgcggatcggtcactttctcagtagcaacaccaagttgtggattggttttcagccattcgtttaccaccgctgtgtcaccaaataccccatcaatacgaccatttttcagatcgataaaggcattctgataactgtcataagagacagttttcacttccgggtgctgatcctgaatatatttctggtgcgtagtaccgttttccatcccaatacgtttgcctttcagatcggcaaacgttttgtaggtatcttttttggcaatcacgacggcactgttttcatagtagggcgtggtaaagcttacctgtttgctacgctccggggtgatatccataccggagattacggcgtcatattttctgaatttcagggacgggatcaggctgtcgaacgcgtgattagtaaaagtacattctgcctgcatttgtttgcacaaggcttttgccagatcgatatcaaagccgacaatctcattattagcacctatagattcaaagggtggataggtggcactaacgccaaaattgattttctctgcggcagaagcaccgaaagtaaaggaagcaagtaaagcggcaagaactaactttttcatgatggaactcccgtctgtcaatcttatgatttttggccgtgtctgcggcatgggataacaatgccatcaagtgaatttatatgcaataaacatgattaaataatttaaatgaaataaaaaagacggacaacttagtgggttgtccgtcttcattataagaatttatgcactatgtaggccggataaggcgtccccgccgcatccggcacaggcaccgtgctgatgtctgatgcgacgctggcgcgtcttatcagacctacaaaaccccccggcgaatgtacgcagccacattaatttcgccgttcgaatgccagcgctttgcgctcgatcagacgcatcatcagcgtcagcaggccgttaacgaccaggtaaataatccctgccgcaccgaacaccattacatcgtaggtgcgtccgtacaacaactggctgtatcccatcacttccatcagcgtaatggtgtatgccagagaggtacttttgaataccagcaccacttcgttggaataagaagagaggctgcgtttaaaggcatacggcagcaggatcgccagcgtatcttttttgctcattcccagggcgctacaggactgccactgaccttccgggatcgcacgaattgcaccgtaaaacagctgcgtggtatacgccgcactattcaggctcaacgcaatcagcgcacataaccacggttcactcaacaaatgccacagtgccggatactcctgcaaagtcggaaactggcccggcccgtaataaatcaggaagatctgcaccagcagcggcgtaccggtaaacagcgtgatataaccccgcaccagccacaccagcaccggcgttttcagcgtcaggatgatggtaaaaatcaatgccagaatcagtgccacaatcaggctggcaacggttagcgtcaggctggtgtgtagccctttcatcagttcgggtaaatactcaaacattagctgggcctccgctcaaaacgtgtcgcgcgcaggtcaatgcgtttgagaatgtactgactgagcagggtgatcaccaggtaaatcgccgccgccacaatgtaccaggtaaatggttcctgggtacgagtagcgatgctttttgtttgcagcattaaatcattcacactaatcaaactgaccagcgcggtatctttcagcagcaccagccactggttaccgaggccaggcagcgcatgacgccacatctgcggcatcaccagacggaaaaagatagcgcttttgctcagccccagcgcctgaccagactcccactgacccaccggcaccgctttcaacgcgccccgaagcgtttggctggcataggcggcatacagcagactcagagcgatgacaccacaaaggaacgggctaacgtcgaagttctcaatgtccatctgcactgggatctgcacgaacccaagattgatagtgaagccatcgctaagcgtcagcagcagctggctggagccaaaatagataaacagcaccaccagaatttctggcaggccacgcagaatggttaccagcgcactacctgcccacgcgacaggacgccattttgcgctctcccataccgcaaagaacatcgccagcgccagcccgacaatcaatgcacaaacggcaaggccgacggtcatcccggcggcgcttgctaaaggaaaaaattcattcatcaggaattacttctggaaccatttgttgtagatggtttcgtaagtgccatctttcttcactttttccagcgcagtgttgagtttctgctgcagctcagtgttgccctgacgtaccgcgatgccgaggccagtgccgaagtaatctttatcggtcactttgtcgcccaccgccgccagtttcgggttatctttcagccactcagtgaccactgcggtgtcaccgaagacgccgtcgatacgcccgttttgcagatccagttttgcgttctggtagctgtcatacggaacggtagtgatttccgggtgcttatccataatgaatttctggtgtgtcgtcccgttctgtacgccgacttttttgcctttcagctgatcaacactggtgtatttgccttgctgacccacaaacagggcagagttgtcatagtacggggtggtaaacagcacctgcttttcacgctccggagtgatatccatgcccgccatcacggcttctacgcgacggaatttcaggcttgggatcaggctgtcaaacgcctggttagagaaagtgcaggttgcatcaatctctttacacagcgcttgtgccaggtcgacgtcaaaaccaacgatctggttgtttgcatcaatgctttcaaacggaggataggaggcttcggtagcaaaacgaatggtttcggcagctgtggcggaaagactaaaacctgcaattaacgcggcaatcagaacttttttcattgttgttatcccgaatcttagtgagagagatagtttttaaatgcttcggtttgcggctcggtaaagcagctcgcgtcgccttgttctacgatatgaccattttccatatacaccactcggctggcggttttacgcgccacttcaacttcgtgggtgacgatcacctgggtaatattcgtttctgccagctcacgaatgatgctgacgatttgtgccgtaatttccgggtccagtgcggcggtcggttcatcgaacagcagtacctgcggttccatcatcaacgcacgggcaatagcaacacgctgctgctgaccaccagaaagatgcagcgggtaacgatcgctataaggtttgagacgcagacgttccagcagtttttctgcacgggccagcgcctgatctttactcaaccccagtacacggcagggcgcttcaatcaggttttgctgcacggtcagatgcggccacaggttgtattgctgaaacaccatgccaacgttacgacgcaaatcgcgaatcgctttgtcagagggtgttttggtgaaatcgaaatggttgcctgcaatgttgagcgtaccggagcgcggcatctcaagcagattgagtacacgcagcaggctgcttttacccgcgccgctggggccaagtaacaccagcgtttcgccctgtgggcaatccagcgtgatatcgaacagcgcctgatgcgcgccgtagaagcaattaatgccgtttaattgaatactcattgacactcgtatactggcagtctgatagctattgaggtcgaagatagtacctttgacagaataattatgcaatatttctgctttaaaagttaaaagcaaagcgcattattcaataaacatagcacaaaataacgggggcggtggtcggcgagcataaatgtcggcattcctcacgaaatgccggacaatttacggggtttattggttgatcaaggcgttagcgattctcgatggactgacggagcgtacccgccgtggcatgaacgctaccgcctaagtaacgcacatcgtcgatgacccaacactggccttcctgaatcattaacacttcatcctgccaaccctggtcaccctgtttgagatccacgcgcaatggaatgttacgggcatcacgattagggatagtgcttgcactggcaacgtgggcgctatctggcaaggtggttcgactggagaatggatcgttggtcagtagttcccgatggttattatcccgggaggcatcgctaagcagtgtcgccagtttgtcgctcagataagggcgcaaggcggtgatgtcgttgctgcggtgcaaaatgcggtagtcataaaattgctgggccacgttatccgggcctccttcaacgcaaggaccactgcgtgtgccgttatctttataagctggagtgactgtggtgcaggcactgaggagcagtgcgcaggggataagcattgtcaatttgctgtagcgcataatgatttccttataagcgatcgctctgaaagcgttctacgataataatgatatcctttcaataatagcgtatcagtctgataatgcttttgagatcgaaggcttagcaaacaaggagatcgatcatgcaattttctacaaccccaactctggaaggccagaccatcgttgaatattgcggtgtggtgaccggcgaagcgattttaggtgccaatattttccgtgatttctttgccggtatccgcgatatcgttggcggacgttccggtgcgtatgaaaaagaactgcgtaaagcacgggagatcgcctttgaggaattaggctcccaggcgcgggcgctgggggccgatgccgtcgtcggtattgatatcgactacgaaacggtcgggcaaaacggcagtatgctgatggttagcgtcagcggtacggcggtgaaaacgcgtcgatgagaagattcttctggctggtcgctgccgctctgttattggcagggtgtgcaggcgaaaaaggcattgtcgagaaagagggatatcagcttgatacccgacgccaggcgcaggcggcgtatccgcgcattaaagtgctggtgatccactacaccgcagatgattttgatagcagcctggcgacactgaccgataagcaggtcagcagccattatctggtccctgcggtaccaccgcgatacaacggtaaaccgcgcatctggcaactggtgccggaacaagaactggcctggcatgcggggattagcgcctggcgcggggcaacgcgccttaacgacacctctattggcattgagctggaaaaccgtggctggcaaaaaagcgccggagtgaaatattttgccccgtttgaaccggcacagattcaggcgcttattccactggcgaaagatattattgcccgttatcacatcaagccggaaaacgtagtggcacatgcggatatcgcaccgcagcgcaaagacgatccggggccattatttccctggcagcaactggcgcagcaggggattggtgcctggccggatgcgcagcgggttaacttttaccttgccgggcgcgcgccgcacacaccggtagataccgcgagtttgctggagcttttggcgcgctacggttatgacgttaaacctgatatgacaccgcgcgagcagcggcgcgtgattatggcattccagatgcatttccgcccgacgttatataacggcgaagcggatgcagaaactcaggcgattgccgaagcattgctggagaaatacgggcaggattaacgcggcagttttccgtggtcgcgtagccaggcggcagttttctcgataccttcatccagggtgatgaccggctgataacctaactcttcctgcgcacgcgtaatatccagcgtaaagtcaaaattcaacttggagacgccgtagtgggtcagcggcggctcttttgcactcttgcggcctaaacgctccatgctgcgggcgatcatatccagcatcgggtaggggacggaacgaatacgacagtcaatattcaactcgtcgatcagcttctgcacgatgctgcgcagtgtgcgatgctcgccgttggtgatgttgtacacacgcccggaaggtagcttatcgcaggcttcctggcttgccagccacattgcgtgcacggcattttcatagtaggtcatatcgaccagcgcactgccgccatgcggtaacagaatactgccgtagtggtgcatcatatgcgccagacggggaataaagactttatcgtgcggtccgaacagactttgtgggcgcagaatagtaaagcgcgtttgtggattcgcctggctaagcatattgatcacttcttcgctggctgctttgctgcgggcaaactcgttggcgaagcggtgagggcgaaaatcttctttaatatcgcgatggtggtgataatcgaagtacagggagggggaagagatatgaataaagttacgcacaccccaggcgacagcccattcacccaggcggcgagtggcgcgaacgttagccagatcgaaagcctgttgtgtcccccagggactggtaaagctggagcagtgccacagcgtatcaatgcccgcgagcatcactttagcttgactactaaccagctcggtcagatccgccggaacaaactctgcgcccattttttccagcaatttgcccattgcctcgttgcgaccggtcgctcgcacgctgatgcctttctggcataaaaactctaccgcgtttcgacctaagccgctggtggcgccggtaaccagtaccttcatatcaatccactgttgttgagaaaataacgtgcgcattcttccgtgatttcccccatgatgcaatgggaaacatgaaagaataacgcaggttttgtcgattaatctgtgctttgttctgccagtctggcgatttgttttgccattccgcgaaaaataaacagatgcgcggggatcatcaataaccagtaaaacagccccggcataccgtgcggatgccagaaagcgcggacatcgatagtacgatagtcgcctttatcttccaggctaaaacacagtcgtcccagccccggcgctttcatgccaaataacaacgtaagttgtttttccggttcaacgacaatcactttccagctatccaccgcatcgccagtctgtaaatattcgcgctccgggcggcctttcgccagcttatgaccgatcgcgcggtccatcaacgcccgtgtctgccacaaaatattgccaaagaaataacgctctttaccgccgatttggttcactacctgccataaagcagcaaggctggcggacgttttaacggtaaaccccgcctgtttggcaaaataaccgtactccggtcgccagcgggcaaaggcctgagcgtcgtagccccagtcgctggagttgaccagtttttcctcctctttcaacgtgctacgtaccgcgtcatcgaaagcgatcagccgttgtgggatgagtgcacgtagcgcggtatcatccgccagcagatcgtgtttcagcccctgaatcaacgccctggcggtggtgggcggtacggaagtaatcacattgagaaaccacacgctaatccagcgggtggggagggggatggggatcaaccagcggcgcttaccgctcaccgccataaaatgttcaaactgttgctgataactgagcacctctggtccggcggcttcgaagatgcggtgttcgctggccggatgatctaacaacgcaaccagatagtgcagcaagttttccagcgcaatgggcgtggtgcgactacgaacccagcgcggaggcgttaagactggcaggttgtagaccatatcgcgcatgacttcgaacgccgcggaacctgcgccaacgataattccggcccgcagttcggtcacgggtacattcgcttcacgcagaatgtccgccgtagcctgacgagcacgcagatgatcgctctgctcatgtggcggggcctgcaagctactaagaaagattaattgcttaactggtacttcacgtagcgcatcgcggacgttgagagccacctggcgctcctgagcgataaaatcgccgccttcgcccatgctgtgcaccagaaaatagaccgtatcgatatcctgcaacagggccggtaggttatccggccagctgagatcgactttatggcaactgacgtttgccagttgcagctttgcaagcctgtcgacatgacgtgccgccgccaggatctgatgcccttgctggctgagtgtgcgcaccagatgctgaccaatgtagccactggcaccgagaactaaaatgcgttgcggcacgtctctctccttaacgcgccaggaatgcacgccagtgggcggcgacttccgccagttgttcgcggctgacgtcaagatgcgtcaccaggcggacaatcgggctggcgttaatcagcacgtttctcgctttcatgtattcgcctaacgcggcagcattttcttccccgacgcgaacaaacagcatattggtgtcctgacgcatcacatccgcgcctgcttcacgcagctgctccgccatccaggcagcgttgtcgtggtcttcctgcaagcgcgcaacgttatttttcagggcatatatcccggcggcagccagaatgccggactggcgcatcccgccacctgtcattttccgccagcgaatggcacgtttaatgtaatcacgattaccgacgagtaaactaccgactggcgtcccaagacctttgctcaggcaaatggtgaagctatcacaatattgcgtgatctctttcagttcgcagccgtaagccaccacggcattaaagatgcgcgcaccgtcaacatgcagcgccagattgcgctcgcgggtaaattcccatgcttctttcaggtattcccgcggcaacactttgccgttgtgggtgttttccagactgagtaatttggtgcgggcgaaatggatatcgtcgggtttgattttcatcgccactttatccagcggtagcgtgccgtcggcagccgcgtctatgggttgcggttgaatactgcccagcaccgccgcgccaccggcttcaaacagatagttatgcgcggcctgaccgacaatatactcttcgccgcgttcgcagtgactgagcagagcgaccaggttggcctgagtgccggtaggcagaaaaatggcggcttctttaccggaaagctctgctgcgtagtcctgcagagcattaacggtagggtcgtctccgtaaacgtcgtccccaaccggggcggccatcatcgcttcgagcatggcgcggcttggtcgggtaacggtatcactgcgtaaatcaatcatggcatgtccttattatgacgggaaatgccaccctttttaccttagccagtttgttttcgccagttcgatcacttcatcaccgcgtccgctgatgattgcgcgcagcatatacaggctgaaacctttggcctgttcgagtttgatctgcggtggaatggctaactcttctttggcgaccaccacatccaccaacaccggaccgtcgatggagaaggcgcgttgcagggcttcatcaacttcagacgctttttctacacggatacccgtaatgccgcacgcttcggcaatgcgggcaaagtttgtgtcgtgtagttcggtgccgtcagtcaaatagccaccagctttcatctccatcgccacaaagcccagcacgctgttgttaaagacgacaattttcactggcagtttcatctgcactacactgaggaaatcgcccatcaacatgctaaaaccgccatcgccgcacatggcgaccacctgacgttctggctctgtcgcctgcgcacccagcgcctgcggcatggcgttagccatgctaccgtggttaaagctacctaacaggcgacgcttgccgttcatttttagataacgtgccgcccacaccgttggcgtaccaacgtcacaggtgaaaatagcgtcatcggcggcaaaatgactaatttgctgcgccagatattgcgggtgaatggctttctcgctcggtttagctaaatcgtccagccctttgcgggcgtcgcggtaatcttccagcgctttatccagaaacttgcgatcggctttttcttccaccaatggaagcaatgcacgcagagtgctcttgatatcgccgaccagtgccatatccaccttgctgtgagcgccgatgctggctgggttgatatcaatctgaatgattttggcatcggtcgggtagaaggcgcggtagggaaattgcgtgccgagtagcactaacgtgtcggcgttcatcatggtatggaaaccactgctgaagccgattaacccggtcattccaacatcatacggattatcgtattcgacatgttctttaccgcgcagggcatgaacaataggcgctttaattttcccggcaaactcaactaactctttatgcgcccccgcgcagccgctgccacacatcagggcgatattgctggaataacgcagcagttgcgccagtttgcgtaactcttcttcttccggcgtcacgactggttgtggcgcatgataccagtgcatggttgccccttctggcgcaggttttaacgccacgtcgcctggtaacacgacaacgctaacgccacggttaagcaccgctttgcgcatggcaatcgccagtacttgtgggatctgctccgggctggaaaccagctcgcaatagtgactacattcgcggaatagctcttgtgggtgggtttcctggaaatagccgctgccaatttcgctggagggaatatgagcggcaatcgccagtaccggaacgtgattgcggtggcaatcgaacaggccgttgattaagtgcaggttgccggggccgcagcttccggcgcagaccgccagttctccgctaagttgtgcttcagcgccagcggcaaaggccgccacttcttcgtggcgggtggacatccactcgatggtgcccatgcgattaagactgtcactaagaccgttcagagagtcgcctgtgactccccagatgcgtttcacccctgcgctttcgagtgttttggcgatataagctgcaaccgtttgtttcatggttctccatctcctgaatgtgataacggtaacaagtttagttcatctgacggagggggaagggatgggagagaaaggaggcactaacggttaaatagcccgatgaaaggaatatcatcgggcataaggcgattatgcgagaaccaaatccccctgcggatggcaggagcaggccagtacgtaaccttcagcgatttcggcgtcggtcagcgtcattgtgctgctcaccgtatattcaccggaaaccacttttgtcttacagcagccgcaaacacccgcacggcaggcagcgacaaccggaacgttattgctttccagcgcctccagtagcgtggtgccaaccggggcgtaaaattctcgtgccggttgcagtttggtgaatttcagaccgctggtcgccgcttctgctactggggtgaagaatttctctttaaagaaacgcgtcacgccgagcgctttcacttcctgctctacccaatccatatacggagccgggccgcaggtcatcacggtacgactagctaagtcaggtacacctgccagcagttcgcgagtgagacgaccagcgataaagccttcggtaacgttattttctgccaccagcgttaccggatagttacgccactcatcggcgaaaataacatcctgcggcgtacgcacgttgtagatcacccgcacatcggcctgtggacggttcttcgcaagccagcgacgcatgctcataatcggcgtgacgccgcagcctgccgccagcaacaggaatttatcttctgctttatcgtcgcaggtaaattcccccatcgcgtcgctaagccagagataatcaccgcgttttacatcgcgcgtcagccactgggagccgacaccgtcatcaatccgccgcacggtcagggtgatatattcactcacgcctggcgtggaggaaatggtgtaagcacgcagcgtttccgcactgtttcgcacgctgaccagtgcatattgcccggcgcgatatgggtagtaatcgtggcaaatcagggaaatcgtccacacatccggcgtttcttgcgtaatgtgatgaacctgcatccgccacgggcattgattcgttggcatcgtcatcgacaaactccttacgcgctcaacagttgcttcatgtcttcttcaacagtggtgatagaacgcaggccgaatttctcgttcagcaccgccagcaggtctggtgtcaggaaaccaggtgcagtcgggccggtgacgatatttttcacgcccagagaaagcagcgtcagcagaatgacgatcgctttctgttcaaaccaggagagcaccaggctcagcggcagatcgttgacaccgcagcccagtttctctgccagagtgacagccagaataatcgcactgtaagcatcgttacattgacctgcatctaccagacgcggcagaccttcgatatcgccaaactcaagtttgttaaagcgatatttaccacaggcgagggtcaggatcaggcagtcatccggcacgctggtggcgaaatcggtgaagtagtggcgctcgccgcgtgcgccgtcacagccaccaagcaggaagatatgacgcagtttttcacggctcaccagatcaatcagcgtatcagcagcgccaagcagcgtctggcgaccaaaacccacggtgataaggtgcggaatttcgctgtacgggaagcctgccatctgttgcgcctgggtgataaccgcagagaaatcatcaccgtccagatgacgcacgccaggccagccaacaatgctgcgggtccagatacgatcgtcataagcgcctacggttgggtcgatgatgcagttgctggtcatcacgatggggccagggaaacgagcgaactccacttgctgattctgccagccgctgccgtagttaccgaccagatgcttgaatttacgcagctccgggtagccatgcgcaggcagcatttcgccgtgggtgtagacattaacgcccgtgccttcggtctgttccagcaggttgtagagatctttgagatcgtgaccggaaatcagaatgcatttacccgccgtcgctttgacgttgacctgggttggcgtcgggtgaccgtatttaccggtttcgcctgcatccagaatgctcatcactttgaagttcatctggccgatttccatactacactcaagaagcgcgttcatatcggcaggccaggtccccagccacgccatgattttatggtactgggcataaatatcgttgtcgtattgaccgagaacatgcgcgtgttccatataggccgccgcacctttcaggccatacaggcacagcagacgcaggccgagaatgttttcgccaatcgccgctttatctttgttaggggtaaattctgctgcctgacgttgcagctcgccgagatcgtcgctcaccagttgcaggtcagccatcgggttatcgacgcgcgcgttggcatctacagccaggcattgcgctttcagcgcctcgcgcagggcaatcgcttcacgagcgtagccgacaatacgcggagaatcgaagttaacgttggtcagggtactgaaaaaggcacgtggcgcgaagctgtcaacatcgtggttgatgatgccgtattcacgcgcttttaccgcccaggcagaaagcccttgcagcgccgcgatgagtaaatcctgaaggtcagaagtttccgccgttttaccacacatcccctgcgcgtaactgcagccgtttcctgccggagtacggatagtttgttcacattgcacacaaaacatgatcacaccttttaaagttatatttaatatacatgtttaaggttaagacgcttaacgcggggataaaagggatttttcatgcaactttaagggagattgatttagcgcaattttggcggcagggatctaccgccagagaggtattacgcagagaaaaaggcgatgaggatcggcactaacaggctaagaataaaaccgtgaacaattgccgccgggaccatatccagcccgccagtacgttgaagaacgggcagggtgaaatccatacttgtggcaccgcataagcccagtgcagtagagcggctgcggcgaatcagcccagggatcaacataatagcaatcagttcacgggccagatcattaaaaaacgccgcgctcccgattaccggaccaaaagattcggtcaataaaataccggaaagagaataccagccgaaaccggaggccattgccagcgcggtattgatggggagatcaagaataaaggcgttaattaaaccaccaattaaactactgacaaccaccaccacggcgacaatcattccccggcgattaaggacaatctgctttaaggtcatgccattattgcgcaactgaataccaacgaggaaaagtagcaaaattaacgtgtattcactggcttcggtcgcgtgttgtaagaaagccagtccacttagaccaatggcaaaaccaatcactactacgccgcacagttttaggctctccagcgccatcgcaatacggctcgggagtttttcttgctgatggtggttgcgccacggcaggcctcgctccagccacatcagggcggcaatattacacagtaaaataacggtaatactgacggcagaataatgcagaatcgccaacaggttactggcgaggttatcgagaaacgccagactgatacccataaaaaagagaataaggtaaaccatccagcttaatagctgattaataacttttaacgcagcttgttggcgaagcggaatgaggtaacccacaatcaggggaaccagaatgattaacagcccagaaaacatgaaaacccagtccttgcaaagatgaagtcgaaatgcgcgatgacacactactgaaagcggaaggacgagtaaagttgcaattaaaaggaaatgttatgcataaggagcagtagagtattcgttttcatttaaagatattcttgcgctttaattacaaactgcaccgatgttggtggcgtcaaaatcgccgaggcgttccctgaaggccggggcagcccacatggatgtgggctgagggcgcgttttacagggatgttacctcgcgcccgacccggtagccgtaagggataagtcgagggcaccgcgcagcggcgattttgttcgccagagcccgggggtgcagggggcggcggcgattggccgccccctgcgcgctccttgcgccagtggcaatatgttgcttagctcatgaaaggagcgcaacaagatgatgaatcaacatataacaacatcttaaaaaaaggcctgacattacgccaggccttctgcgttaattaatcacgcttttccagcagggtccggtaaatcagaccaccgataatgccgccgacaattggcaccacccagaagaaccacagttgttctaatgcccagccgccctggaagatagcaaccgcggtgctgcgcgccgggttaacagaagtgttagtcaccggaatactaattaagtgaatcagggttaaggccagaccaatagcgatcggcgcaaaacctgccggcgcgaatttgtcggttgcgccgtggatcaccaacaggaaacctgcactcaataccagttcaactaccagcgcggaaagcatggaataaccgcctggactatgctcgccataaccgttagaagcaaaaccgctggctgccgcgtcaaaacccgttttaccactggcaattaaatacagcagcgccgctgcaacaataccgccgacaacctgggcaattacgtagccaacgacttcttttgccggaaaacgtccgccagcccataaaccaatagtgaccgccgggttaaaatgaccaccagaaatatgaccaacagcaaaggccatcgtcagaacggtcagaccgaacgccaacgccacgccggcaaaaccaatgcctaattccgggaagcctgcggccagtacagcactaccacagccaccaaaaacaagccagaaagtaccaaaacattcagctgctaattttctgaacatatccaccacaattaaaaattgaccctgtgaaaaatatggtcgttttatagggtcgtcgtaaaaaagtgacgacggaaataatgcgcggctattttaaaaacgaaggcgagtcattcaccagataaataaatccagtaaatttgatttagggcaacagcgggttgccccatatagtcatttgtctgattgacagtgtagtgcacgcaaaagatttaatcctttaggcgtaataaaaaataatttatcatgctaattatttgattttgttgtttttgcagacttatcagcaagagggagtataacgcgattattcgctcatttttcagacatttgccatgcttaaatgtgatgtcatcacgtattagcaaggcctttcccgttatactgccagcgtaaaggataagtcacatatttctggaggggatatgattcttgagcgcgttgaaattgtgggttttcgcggtatcaaccgtttgagcttgatgctggaacaaaacaacgtcctgattggggagaacgcgtggggtaaatccagcttgctggacgccttaactctgctgctaagcccagaaagtgatctctaccattttgagcgcgacgatttctggttcccgccgggagatatcaacgggcgagaacatcatctgcatattattttgaccttccgcgaaagcctgccaggccgacatcgggttcgccgttatcggccgctggaagcgtgctggacgccatgcaccgatggctatcaccgtattttttatcgtctggaaggggagagtgcggaagacggcagcgtgatgacactgcgcagttttctcgataaagacggacatccgattgatgtcgaggatattaacgatcaggcacgccatctggtgcgtttaatgccggtgctgcgcttgcgtgatgcccgttttatgcgccgtattcgtaacggcacggtgccaaatgtccctaatgtggaagtcaccgcgcgccagctcgatttcctcgcccgtgagttatccagtcatccgcaaaatctctctgatgggcagattcgtcagggactttccgcaatggtacagctgcttgagcattatttctctgagcagggggccggacaggcgcgatatcgtttaatgcggcggcgagccagcaatgagcaacgaagctggcgctatctggatatcatcaaccggatgattgaccgacctggtgggcgcagctatcgggttattttgctcggcctatttgctactttgttgcaggcaaaaggcacattgcgactggataaagacgcccgtccattgttgctgatcgaagatccagaaacccgtttacaccccattatgcttagtgttgcctggcatctgttgaatcttctgccattgcagcgcattgccaccaccaacagcggtgagttgcttagcttaacgccggtagagcatgtttgccgactggtacgtgagtccagccgcgttgccgcctggcgtctggggccgagtggcttgagtaccgaagatagccgacgcatatcctttcacattcgttttaaccgtccgagtagcctgtttgcacgctgctggttgctggtggaaggggaaacggaaacctgggttatcaatgaactggcgcgtcagtgcggacatcattttgatgccgaagggatcaaggtcattgagtttgcccagtccgggctaaagccactggttaaatttgcccgccgaatggggattgaatggcatgtactggtcgatggcgatgaagcagggaagaaatatgccgctacggtacgcagcctgttgaataacgatcgggaagccgaacgagaacatttaacggcgttaccggcgctggatatggaacattttatgtatcgccagggattttccgatgtgttccaccgcatggcgcaaatcccggaaaatgtaccgatgaatctacgcaaaattatcagcaaagcgatccatcgctcttccaaacccgatcttgccattgaagtggcaatggaggcaggacgtcgtggtgtggactccgtaccgacgctgctgaaaaaaatgttcagtcgcgtgctgtggctggcgcgcggtcgcgcggattaaccgcgaaacatcgtggccatttgtggctgaatagcgtcgagcatctcatagcgccgacggtattcagcccgttttttactggcgatttcggcaatctcttttcgtgctatctgtgctggaaggcggtaatggcgttcagcatcacatacgccgccaacgctttcccagaaagcgttgtaatcagcgtggatcttgccttctttatcgcgataacgcaggctgcggtaaatatgcgtttcattgctgacggcaataatctgctctacctgcaaacgttgggcaaacagacaggccgcttccatcacgaggcgtttgggaaatagcccgtggcaggctttcgtcgcattctggatttcctgatgtggaatttcccattttgcgccttgcagtccgccaataaacatcgttcttttcccctgatattcacacagggtaaacgtgatctctgccagaggaataccttcgctgttgcggaacaggattgtgctgtcaccttctttatccatactgatcatcatggtcagctcaagcgtgaactgctcgccgtttttgccttccagcttcgccagttgcagcccgggggtattcaaatataagctgaattcttccgcgctcatacattcgcggagtaacgcataatggtaacgtaacgcctccagcaattgcttacggctaagattcgccgcaaggtaagggcgatgcagacgcacaggcagtcgcggctggcgcgttaacaatacattgagattaggccagtgggaaagttcgttcatccactcaacgcttaaacgcggcataatcaagctgcgcagcaaaaatttctggcgaaaactacggcgatgccagaatttacccggccgacactgtccacgtgccagactaagaaaaagactcaggctgctgagagattcagatggcgtaaaggtccgttcagttagctggctcatattcatgaaatcaatggttatacatggcgtgcttttcaccattgcgtatcttaaccaaacatcaatagtgtgattactaacgtaaattttagggttttgttgatatttcgttgaagttaatgacccggattggcatatggagtattcagaaaatttatgaaaaagcggaaaaccgtgaagaagcgttacgttattgcgctggtgatagtcatcgccggactgattacgttatggagaattcttaacgcacccgtgccgacttatcagacgctgattgtgcgccccggtgatttacagcaaagcgtgctggcgaccggaaagctggacgcgctgcgtaaggttgatgtgggcgcgcaggtcagcggtcagttgaaaactctgagcgtggcgattggcgataaagtaaaaaaagaccagcttttaggggttattgatcctgaacaggctgaaaaccagattaaggaggtcgaagcaacgctgatggagctacgtgcgcagcggcagcaggcggaagcggagctgaaactggcgcgggtgacgtattcccgtcagcaacgtctggcacaaacgaaggctgttagtcagcaggatctcgacaccgccgcgacggagatggctgtgaaacaggcgcaaattggcaccattgacgcgcaaatcaagcgcaatcaggcttctctcgatacggctaaaaccaatctcgattacactcgcatcgttgccccgatggccggggaagtcacgcaaatcaccactctgcaaggccagacggtgattgccgcacaacaagcaccgaacattctgacgctggcagatatgagcgccatgctggtaaaagcgcaggtttctgaagcggatgtaatccacctgaagccggggcaaaaagcctggtttacggtgcttggcgatccactgacgcgctacgaggggcaaatcaaggatgtactaccgacgccggaaaaggttaacgacgctattttctattacgcccgttttgaagtccccaaccccaatggtttgctgcggctggatatgactgcgcaagtgcatattcagctcaccgatgtgaaaaatgtgctgacgatccctctgagcgcgttaggcgatccggttggcgataatcgttataaagtcaaattgttgcgtaatggtgaaacacgcgagcgtgaagtgacgattggcgcacgtaacgataccgatgttgagattgtcaaagggcttgaagcgggcgatgaagtggtgattggtgaggccaaaccaggagctgcacaatgacgcctttgctcgaattaaaggatattcgtcgcagctatcctgccggtgatgagcaggttgaggtgctgaagggcatcagcctcgatatttatgcgggtgagatggtcgcgattgttggcgctagcggttccggtaaaagcaccctgatgaatattctcggctgtctggataaggccaccagcggcacctatcgcgtcgccggtcaggatgttgccacgctggacgccgatgcgctggcgcaactgcgccgcgagcatttcggctttattttccagcgttaccatttgcttagccatttaaccgccgagcagaacgttgaagtacccgccgtctatgctggtcttgagcggaaacagcgactgcttcgtgcccaggagttgctgcaacggctggggctggaagaccgtacagagtattatccggcacagcttagcggtggtcagcaacagcgcgtcagcatcgcgcgggcattgatgaacggtggtcaggtaattcttgccgatgaaccaaccggcgcactggacagccattctggcgaagaggtgatggcgatcctgcatcagctgcgcgatcgtgggcatacggtgattatcgtcacccacgatccgcaggtcgctgctcaggccgagcgggtgatcgaaattcgcgacggcgaaattgtgcgcaatcctcccgccattgaaaaagtgaatgttactggcgggacggaacctgttgtcaacacggtgtctggctggcggcagtttgtcagcggttttaacgaggcgctgacgatggcatggcgggcgctggcagcgaataaaatgcgtactttactgaccatgctggggattattatcggtattgcgagcgtggtttccattgtcgtggtgggtgacgccgccaaacaaatggtgctggcggatattcgttctattggtacgaatactattgatgtctatcccgggaaagattttggcgatgacgatccgcaatatcagcaggcgctgaagtacgacgacttaatcgccatccaaaaacaaccgtgggtcgccagtgccacacctgccgtcagccaaaacctgcgcctgcgttataacaatgttgatgttgctgccagtgccaatggcgtgagcggcgattattttaatgtctatggcatgaccttcagtgaaggaaacacctttaatcaggagcagctgaacggtcgtgcgcaggtcgtggttctcgacagtaatactcgccgccagcttttcccccataaagcagatgtggttggcgaggtgattctggtcggcaatatgcccgccagagtcattggtgtggcggaagaaaaacagagcatgtttggtagcagtaaagtgctgcgtgtctggctaccttacagcacgatgtccgggcgagttatgggccagagctggcttaactccattactgtcagggtgaaagaaggatttgacagcgccgaggcggaacagcaactcacgcgtttacttagtctgcgccacggaaagaaggatttctttacctggaacatggacggcgtcttgaaaactgttgaaaagaccacacgtactttacaactgtttctgacgctggtggcggtgattagcctggtggtgggcggtattggtgtaatgaatattatgctggtgagtgtgaccgagcggacgcgggaaattggcattcgcatggctgtaggtgcgcgagcaagcgatgttttgcaacagttcctgatcgaagccgtactggtttgcctggtcggtggcgcgttgggaataacactgagtctgttaattgctttcaccttgcagcttttcttacccggctgggagattggttttagtccgttggcgctgctgctggcgtttctctgcagcacggtcaccgggattttatttggctggttacccgcacgaaatgcggcacgactggatccagtagatgctctggcacgagagtaatttttgagataaaaatgccagccgatcgggctggcattttgcctttaggatgtacacaatgagacagaagagttatgcgactgccgcttctacttcgacgggcacaataacactggcgtgattgccttttggcccctggtggacatcaaactgaacggattgtccagcttttagcgttctgtaaccatccatctgaatggtggaataatgagcgaaaatatcttcgccgccgccttcagggcagatgaaaccaaaccctttggcattgttgaaccacttaacagtacccttttccatgcttcgacatccttcgcaaatcttatacaagtaagatggaataaaccggggtcagagagggggctgttcaaaacctcgccaactctagaaatacaatttagagaattagggcgagccgtcaagcatttgacaggggacaaggggcaggtatgaatcaaaaatttgaagcagttaacgctattgacaggaatgtgacagatgtcgctgatgccaacgatagatgatagttatctatcatgtggagtagattggtcaggcaaataagctcttgtcagcggcagggcgttctgccgataaccgtaaccgaagatgataactgacaatgggtaaaacgaacgactggctggactttgatcaactggcggaagaaaaagttcgcgacgcgctaaaaccgccatctatgtataaagtgatattagtcaatgatgattacactccgatggagtttgttattgacgtgttacaaaaattcttttcttatgatgtagaacgtgcaacgcaattgatgctcgctgttcactaccaggggaaggccatttgcggagtctttaccgccgaggttgcagaaaccaaagtggcgatggtgaacaagtacgcgagggagaatgagcatccattgctgtgtacgctagaaaaagcctgaatgcaggcataaaaattgggggaggtgcctatgctcaatcaagaactggaactcagtttaaatatggctttcgccagagcgcgcgagcaccgtcatgagtttatgaccgtcgagcacttgttactggcgctgctcagtaacccatctgcccgggaggcgctggaagcgtgttctgtggatttggttgcgctccgtcaggaactggaagcctttattgaacaaaccacacccgttctgcctgccagtgaagaggagcgcgacacacagccgacgctgagttttcagcgtgtactgcaacgtgcggtcttccatgtccagtcctccggtcgcaatgaggttaccggtgcaaacgttctggtcgctatctttagcgaacaggagagccaggcggcatatctgttgcgtaaacatgaagtcagccgtctcgatgtggtgaactttatctctcatggcacgcgtaaagacgagccgacacagtcttctgatcctggcagccagccaaacagcgaagaacaagctggtggggaggaacgtatggagaatttcacgacgaacctgaatcagcttgcgcgcgtgggcggaatcgacccactgattggtcgtgagaaggagctggagcgtgctattcaggttctctgccgtcgccgtaaaaacaacccgctgctggtgggggaatctggtgtcggtaaaaccgcgattgcggaaggtcttgcctggcgaattgttcagggcgatgtgccggaagtgatggctgactgtacgatttactctctcgatatcggttctctgttagcgggcacaaaatatcgcggcgactttgaaaaacgttttaaagcgttgctcaagcagctggagcaggacactaacagcatcctgtttattgatgagatccacaccattatcggtgcgggtgcagcgtctggtggtcaggtcgatgcggctaacctaatcaaaccgttgctctccagcggtaaaattcgtgtaattggtagcacaacctatcaggagttcagcaacattttcgagaaagaccgtgctctggcgcgtcgcttccagaaaattgatattactgaaccgagcatcgaagaaactgttcaaatcatcaatggcctgaaaccgaagtatgaagcgcaccacgacgtgcgttataccgcaaaagcggtgcgtgcggcggtagagctggcggtgaaatacattaacgatcgtcatctgccggataaagccattgatgttatcgacgaagcgggcgctcgcgcacgcctgatgccggtaagcaaacgcaagaaaaccgttaatgtggcggatattgagtccgtggtggcccgtattgcacgcattccagagaagagtgtttctcagagtgatcgtgataccctgaaaaacctcggcgatcgcttgaaaatgctggtcttcggtcaggataaagccattgaggcgctgactgaagccattaagatggcgcgtgcaggtttaggtcacgaacataaaccggttggtagcttcctgtttgccggccctaccggggtcgggaaaacagaggtgacggtacagcttagcaaagctttgggcattgagcttctgcgctttgatatgtccgagtatatggaacgccataccgtcagccgtcttattggtgcgcctccgggatacgttggttttgatcagggcggtttgctgactgatgcggtcatcaagcatccacatgcggtgctgctgctggacgaaatcgagaaagcgcacccggacgtgttcaatattctgttgcaggtgatggataacggtacgctgaccgataacaacggacgcaaagcagacttccgtaacgtggtgctggtgatgaccaccaacgccggggtacgggaaactgagcgcaaatccattggtcttatccaccaggataacagcaccgatgcgatggaagagatcaagaagatctttacaccggaattccgtaaccgtctcgacaacattatctggtttgatcatctgagtaccgacgtgatccatcaggtggtggataaattcatcgtcgagttgcaggttcagctggatcagaaaggtgtttctctggaagtgagccaggaagcgcgtaactggctggccgagaaaggttacgaccgggcaatgggcgctcgtccgatggcgcgtgtcatccaggacaacctgaaaaaaccgctcgccaacgaactgctgtttggtagcctggtggacggcggtcaggtcaccgtcgcgctggataaagagaaaaatgagctgacttacggattccagagtgcacaaaagcacaaggcggaagcagcgcattaatctgattgttaggtaggttggtcaagtccgtaatctcgaaagaggttacggactttttgtttatggggtggaggaggttcagaccctttttttaatgatgatggtaagttgttgataattagtgctgcgggaaggtaaggataaaaaagggtgctgcaggagaatgggatggttttgctttattaacaacgggctaaacgtgtagtatttgagttcactgccgtacaggcagcttagaaattcacaggtaacatactccacccgcccaccatgttcactgccgtacagacagataaaatgcgaaaaaaaagctcgcactttcgtacgagctcttctttaaatatggcggtgagggggggattcgaacccccgatacgttgccgtatacacactttccaggcgtgctccttcagccactcggacacctcaccaaattgttttgctaccaaacctcatgggtggcaacggggcgctactatagggagttggagtaaaacggtcaagaagaattttaatgataattattgtttgctcatactgtaaacaagttgtgcagtatatctacatcgagacaagttacggacttatacttccaaagtacttcatacatatcacaaaataaaaaggccggttaaaccgaccttttactcgttctttctcttcgcccatcaggcggtaaaacaatcagcgactacggaagacaatgcggcctttgctcaggtcgtacggggtcagttcaacagtcactttgtcgcccgtcaggatgcggatgtagtttttgcgcattttaccggagatgtgtgcagtaaccacgtgaccgttttctaactctacgcggaacatggtattaggcaacgtttcaagaacggtaccttgcatttcaatattgtcttctttggccatctaatcctctggggtatcactaccgtaatttgaaccggcaagataatgccgaagttctgtaaataagtaaagatttgcgcgctaaatcgcaacaaacaggttcggcacattactccgaaaacacacggctaagccgcaccaaaagcgcaacgtataagggagcggtgagataaacgatgggcgttacctgacgcgaaaaattccttatcggcagcggggtaatgagcgtaaccaactctgcgaccgcaattataacactctggggagaaatgtgccgaaaacattcattcttgtggactaaacaagcatcgtggtacccagaaattattcggcaatcgtccgaggcgcatttgattgagataattaaggtaatcccggcggggaatttcgcaggcaccaaggcttgctgtgtgatcgttaaggacctggcagtcgataagcttaccgccatgaccgataaattcctcacagaataccagaagcgccgttttagacgcattttccatccggctgaacatggactcgccacaaaatagcgttccctgggccacgccgtacataccgccgacaagctcatcttcacgccagacttcaatggagtgggcatggccgagttcgtgaaggcgatggtaggcttcgaccacgccacgcgtgatccaggttccttcttcgcgatcgctggcacagccttcaatgacctgaccaaaagcgtaattcatcgtgacacgataggggctgcgtttatgaaatcgcttcatactacggctgatatgcagactttctggccatagcaccgcgcggggatcggggctccaccagaggatggggtcgcctggagaaaaccacggaaaaataccacgctggtaagccattaacaggcgcgcagggctaagatcgcccccaagtgccagcaggccgttaggctcacgtaatgcgccttccggggaagggaaggctatactatggcgagaaagctgaaccaggcgcatgaccgcaaaactccacgcaagtcggatcgttcaataatagcttacaaaccctgcttgaactggtaataacgcccctgtctggcaagcagttctgcgtgagtaccttgctcaataatttgcccgttgtccatcactattatttgttggaaacgagagagtccgcgaagtcgatgggtgaccattaacaccgttttctcacgcatcatttctgcaagcaattcaaggatctggctttcggttgtggcatctaagccttcggtaggttcatccagcaacaccagtggcgcatcatgtaacagcgcacgggcgatagccagacggcgcagttcaccaccggagagctggcgtccgccttcacctaaccaactgttgagacctgcatcctcgagcagcttttccaggccaacgcgacgcaagatctcgctcagagcctcatcactactgccagggctggcgagtaaaagattatcacgcagcgtggcgctaaacagatgcactcgctgaggaacaacgctgatggtctgtcgtagagccgcttcattcaggctggctatggggctatcgttaagcaaaatctcgccctgttgcgggtcccatgcgcgggtcagctgttgtaacagtgtacttttgccgcatccggttcgcccgagaatcgctatatgttccccggcgtttacctgaagagaaatccctttaagtgcctgttgagattgctccggataagtgaactgaacatcccgtaacgtcaggctaacgcgatcggcaacacgagtttgggtatcaggaaaggtgacctccggtttttgatccgttaagtcagagatacgtacggcagaggcaatgacttgccccagatgctgaaatgcacccgttactggtgccagtgcttcaaacgcggctaacgcgcagaagacaaacagggcaattaacgcgccgggttgagcattgccgccaacgccgccagacgccatccacagcatcaggatcaccgctaacgcgccaatgagcagcattatcgcttggctcaatgcggtcagttcagattgacggcgttgcgcttccagccattgaatttctgtattctctagttgcgtgcgataacgatcgctggcaccaaaaatggtcagctcagcttgcccttgcagccaggccgtcagttgttggcgatactgtccgcgaagatgagtcagattttgcccggtgctttttcccgcacgataaaacagcggtggcatcaggaaaagcgtcagtaacataatgccgcccagcgtaaaggcgagggtgaaatcaaggaaacttaacccgattgtcaccaccataatcaccacaaaagcgcccaccagcgggctgataacgcgcaggtaaagatgatcgagcgtatcaacatccgccaccacgcgattgagcaattcgccctgacgatagcgcgccagtccggcaggggagaggggcagcaatttgctgaaggtgtaaatgcgcagatgctgcaacacgcggaaagtcgcgtcgtgacttaccagacgttcaaaatagcgcccggcagtacgggtgattgctgcgccacgcacgcccgcagcgggtagcatatagttgaagctgtacagtccggcaacccccgcaaccgcactggcgctgaggaaccagccggaaagtgtcaacagaccgatactggcgagcagcgtcacaattgccagcacaataccaagacttaacatccatttatgacgtttatacagtgccagatagggtagcaaagcgcgcatttaaatctcctcctgacgatgggccagtaatgtggcgaatgggccaccagccacacttaattccgcgtaacgtccttgctcaataatccggccatcctgcataacccaaatgacatcccagtcagcaagatcttctaactggtgggtgaccattaacgttgtctggcgcagagaggcggcattcagcgcctccattacgcgctgttcactgtgagcatcaaggctggcagcgggttcatccaacagtaataggctacagggatttagtaacgcacgggccaccgccacgcgctgcgcctgccccacggaaaggcgggcagcctggtcgccaacaggcgtatcaacgccttgtgggaggagcggtagaaactcgctgacccaggcgttatccagcgctgcttgtaattcttgttcgctggcatcaggtcgcgccagtagtacgttatcccgcaatgttgctgccggtaattgtgggttttgcccaacccaggagagatgtttacgccaactttctggacttaaatcgcgtaattctatcccgttgattcgtaggcttccctgataactgagaaaaccagaaagcgcgttcagcagactgcttttaccactaccgctgcgaccaaccaacaccgcacgttggcctgctggcaaagtaaagttcagcggtccggccagcgttttaccttccgggctcgtgataaacagctcctcggcctcaatggtcaccggatcggtgcttgctaattccgcctcaccacgttgcggatgggcgagcggggtttccataaacgttttcagactgtcagctgcgccaacagcctgggctttagcatgataaaacgtaccgagatcgcgtaatggctggaaaaactctggcgcaaggatcagggccagaaaacccgcagccagcgtcacaccggtatcgtagtgaccaaaatccagctcgccgagataggaaaaaccaaagtagaccgccaccagagcaatactcaggctggtaaaaaattcgagaatgccggaggataaaaacgccagccgtagcacttccattgtccgttggcggaaatcttcgctagcagaacgaatactttcaatttcagcttcaccacgaccaaaaatacgcaatgtttccatgccgcgcaggcgatcgaggaaatgcccacttaagcgagcaagagcgagaaagttacgtcggttagcatcggcagcccccattccaaccagcgccataaacaacggaattaacggtgcagtgcccagcagaatgagcgccgcagcccagttagaggggaagattgccaccacaatcagcaacggcacgctcactgccagcgccatttgcggcagatagcgtgcatagtaatcatgcatatcgtcaatttgctcgagtaccagcgtcgcccagctccccgcaggtttaccctgaatccacgctggccctgcttgttgcagacggtcgagaacctgacggcggatggcaaagcggatatgctgcccggcgtgataacccacccgttcgcgtaaccagaccacccatgcgcgcagtacaaaggtcagaaccagtaacgtaaagggaagcagcagggcttcacggggaatattctccataatcatatgttgcagaattcgcgccatgaaccaggcctgggcaatgatcaatatgccgctcacaaagcccagcagacgagaaatattcagccaacgttgggagatgacgctttgctgttttaaccagcgggttaactctttttgacgagatttattcattgcacgcttagcaggtgagttatcagaattatttgcagagcaatgttacaacggggaaaaaataaaggcgacccatagtcgcatggtgtcgccttctttacttttgttactgatttgtaaaattattttgcgtcagctaaaccatcgaggtagcgttccgcatcaagtgctgccatgcagcctgtaccggcgctagtaatggcctggcgataaatgtgatccatcacgtcgcctgcggcaaagacgccaggaatgctggtctgggtggcattaccatgaataccgctctgtactttgatgtagccgttttccagttccagctgcccttcgaaaatcgcagtattcgggctgtgaccgatagcaacaaacagaccggcaacgtcgagactctcgatgttatcgctgttttgcgtatcgcgcagacgaacgccagtgacacccatttgatcgccggtcacttcttccagcgtacggttggtgtgcagaatgatgttgccgttctccactttatccatcaggcgcttaatgaggattttttccgcgcggaaaccgtcacggcggtgaatcagatgcacttcgctagcgatgttagacagatacagcgcctcttcaaccgcggtattgccgccgccgatgaccgcaactttctggttgcgatagaagaaaccgtcgcaggttgcacaagcagaaaccccacggcctttaaaggcttcttcagagggcaggccgagatagcgtgcagaagctccggtggcaataatcagcgcgtcgcaagtgtattcgccgttatcgccattcagacggaacggacggttttgcagatccaccttgttgatatgatcaaaaatgatctcagtttcaaacttggtggcatgttcgtgcatgcgctccattaataacggaccggtcagatcgtttggatcgccaggccagttttccacttccgtggtggtggtcagttggccgcctttttccatgccggtaatcagcacaggttgcaggttggcgcgcgccgcgtagacagcagcggtgtatcccgccgggccactacccaggataagcagtttactgtgtttggtcgtgcccatgagatccccatagttgttggcagacaatgggcaggattgtagggaatttacagacgtaaaaaaagagtatgacgattttgttaacaatttgtgcaatcggcagcatcgataagcaggtcaaattctcccgtcattatcacctctgctacttaaatttcccgctttataagccgattaaatgatgaataaacgcccctgttaatgaatatctggcatgttgtactaaaaatcgatgttttgctttgacaatcccctggtgttttgcgaaaacattcgaggaagaaaaaaaacagtattcttatatgcgcataaccatgcatgtaaataccatgtttaccgtgctagtgaaatctacgtatggcgtggacagacgccattcgtgatgtcgatagctgccacaaggcaacggtcttctcaccgtagacccaggcattgcgcgccgtgaatcttcatgatttcggtctatcgtgacgggtagcgactctgaacagtgatgtttcagggtcagacaggagtagggaaggaatacagagagacaataataatggtagatagcaagaagcgccctggcaaagatctcgaccgtatcgatcgtaacattcttaatgagttgcaaaaggatgggcgtatttctaacgtcgagctttctaaacgtgtgggactttccccaacgccgtgccttgagcgtgtgcgtcggctggaaagacaagggtttattcagggctatacggcgctgcttaacccccattatctggatgcaagtcttctggtattcgttgagattactctgaatcgtggcgcaccggatgtgtttgaacaattcaataccgctgtacaaaaacttgaagaaattcaggagtgtcatttagtatccggtgatttcgactacctgttgaaaacacgcgtgccggatatgagtgcctaccgtaagttgctgggggaaaccctgctgcgtctgcctggcgtcaatgacacacggacatacgttgttatggaagaagtcaagcagagtaatcgtctggttattaagacgcgctaacacggaacaggtgcaaaatcggcgtattttgattacactcctgttaatccatacagcaacagtactggggtaacctggtactgttgtccgttttagcatcgggcaggaaaagcctgtaacctggagagcctttcttgagccaggaatacattgaagacaaagaagtcacattgacaaagttaagtagcggccgccgccttctggaggcgttgctgatccttattgtcctgtttgccgtctggttgatggctgccttactaagctttaaccctagcgaccccagctggagccaaacggcctggcatgaacctatccataatttaggtgggatgcccggtgcgtggttggcagatacgctgttctttatttttggcgtgatggcttacaccattcccgtcattattgtcggcggttgttggtttgcctggcgtcatcagtccagcgacgaatacattgattattttgccgttagcctacgcatcattggcgttttggcgctcatccttacctcctgtggtctggcggcaatcaacgctgacgatatctggtattttgcctccggtggcgtcattggcagcttactaagcactacgctacaaccactgctacacagtagcgggggaactattgcgctgctctgcgtttgggcagcgggcctgacgttgttcaccggttggagttgggtgaccattgctgaaaaactcggcggctggattttaaacattctcaccttcgccagtaatcgtacccgtcgcgatgatacctgggtcgatgaagatgagtatgaagacgacgaagagtatgaagatgaaaatcacggcaaacagcatgaaagtcgccgtgcccgtattcttcgcggcgcgctagcgcgtcgtaaacggttggcggaaaaattcattaatccgatggggcggcaaacagacgctgcgttgttctccggtaagcggatggatgatgacgaagagattacctacactgcacgcggtgtggctgccgacccggacgacgtcctatttagcggcaatcgtgcaacgcagccagaatatgacgaatacgatccattattaaacggtgcgccaattaccgaacctgtcgctgtagcagctgctgctaccacggcgacacaaagctgggctgcgccggttgaacctgtgactcagacgccgcctgttgcctctgttgatgttccacctgcgcaacctacagtagcctggcagcctgtaccgggtccacaaacgggagagccggttattgctcctgcaccggaaggttacccacagcagagtcaatatgcgcagcctgcagtgcaatataatgagccgctgcaacaaccagtacagccgcagcagccgtattatgcacctgcagctgaacaacctgcgcaacagccgtattatgcccctgcgccagaacaaccggtggcaggtaacgcctggcaagccgaagagcagcaatccacttttgctccacagtctacataccagactgagcaaacttatcagcagccagccgctcaggagccgttgtaccaacagccgcaacccgttgaacagcagcctgttgtggagcctgaacccgttgtagaagagacaaaacccgcgcgtccgccgctttactactttgaagaagttgaagagaagcgagcccgtgaacgtgaacaacttgcggcctggtatcaaccgattccagaaccggttaaagaaccagaaccgatcaaatctagcctgaaagcaccttctgttgcagcagtacctccagtagaagccgctgccgctgtttccccgctggcatctggcgtgaaaaaagcgacactggcgacgggggctgccgcaaccgttgccgcgccagtcttcagtctggcaaatagcggtggaccgcgtcctcaggtcaaagaggggattggtccgcagttgccacgaccgaaacgtatccgcgtgccaactcgtcgtgaactggcgtcttacggtattaagctgcccagtcagcgtgcggcggaagaaaaagcccgtgaagcccagcgcaatcagtacgattctggcgatcagtacaacgatgatgaaatcgatgcgatgcagcaggatgaactggcacgtcagttcgcccagacacagcagcaacgctatggcgaacagtatcaacatgatgtgcccgtaaacgcagaagatgcagatgctgcggcagaggctgaactggctcgtcagtttgcgcaaactcaacaacaacgttattccggcgaacaaccggctggggcgaatccgttcagcctggatgattttgaatttagcccaatgaaagcgttgctggatgatggtccacacgaaccgttgtttacgccaattgttgaacctgtacagcagccgcaacaaccggttgcaccgcagcagcaatatcagcagccgcaacaaccagttccgccgcagccgcagtatcagcagccacaacagccggttgcgccgcagccacaatatcagcagccgcaacaaccggttgcgccacagcagcaatatcagcagccgcaacaaccggttgcgccgcagcagcagtatcagcagccacaacagccagttgcgccacaaccgcaggataccctgcttcatccgctgttgatgcgtaatggcgacagccgtccgttgcataaaccgacgacgccgctgccttctctggatttgctgacaccgccgccgagcgaagtggagccggtagatacctttgcgcttgaacaaatggctcgcctggtggaagcgcgtctggctgatttccgtattaaagccgatgtcgtcaattactctccggggccggttatcactcgctttgaattgaacctggcaccgggcgtaaaagcggcgcgcatttctaacttgagtcgggaccttgcccgtagtcttagcacggtggcggtgcgtgtcgttgaagttattcctggcaaaccctatgtaggtctggagttaccgaataaaaaacgacaaaccgtttatctgcgcgaagttttggataacgccaaattccgcgataatccgagcccattaaccgtggtgctgggtaaagatatcgccggtgagccggtggttgccgatctggcgaaaatgccgcacttgttggttgcggggactaccggttccggtaaatctgtcggtgtgaacgcgatgatcctgagcatgctttataaagcacagccagaagatgtgcgtttcatcatgatcgacccgaaaatgctggagcttagcgtttatgaaggcattccgcatctgttaacggaagtcgttactgatatgaaagatgccgccaacgcgctgcgctggtgtgttaacgagatggagcgtcggtataaactgatgtctgcgctgggtgtgcgtaatctggcgggttataacgaaaaaattgctgaagccgatcgcatgatgcgtccgattccagacccgtactggaagccgggtgacagtatggatgcccagcatccggtgctgaaaaaagaaccatacattgtggtgttggttgacgaatttgccgacctgatgatgacggtaggtaaaaaagtggaagagctgatagcacgtctggcgcaaaaagcccgtgccgcgggtatccacctcgtactggcaactcagcgtccaagcgttgatgttattactggtctgattaaagcgaatattccgacccgtatcgcctttaccgtatccagtaagattgacagtcgtaccattcttgatcaggctggcgcggaaagtctgctgggtatgggggatatgctctactctgggccgaactccacgttgccggtacgtgtccatggtgcttttgttcgcgatcaggaagttcatgccgtggtgcaggactggaaagcgcgtggtcgcccacagtatgttgatggcatcacctccgacagcgaaagcgaaggtggtgcgggtggtttcgatggcgctgaagaactggatccgttgttcgatcaggcggtgcagtttgtcactgaaaaacgcaaagcgagtatttctggcgtacagcgtcagttccgcattggttataaccgtgcagcgcgtattatcgaacagatggaagcgcaggggattgtcagcgaacaggggcacaacggtaatcgtgaagtgctggccccaccgccgtttgactaactaatgcatcgtatgccggataaggcgcggtagcgtcgcatccggcactctatcaactgaaaattcagtattttcttctttcctcaagctgattattagcctggaatagagagtagagggaactcccgatcgggagtgacgtaatttgaggaataatgatgaaaaaaattgccatcacctgtgcattactcagtagcttagtagcaagcagcgtttgggctgatgccgcaagcgatctgaaaagccgcctggataaagtcagcagcttccacgccagcttcacacaaaaagtgactgacggtagcggcgcggcggtgcaggaaggtcagggcgatctgtgggtgaaacgtccaaacttattcaactggcatatgacacaacctgatgaaagcattctggtttctgacggtaaaacactgtggttctataacccgttcgttgagcaagctacggcaacctggctgaaagatgccaccggtaatacgccgtttatgctgattgcccgcaaccagtccagcgactggcagcagtacaatatcaaacagaatggcgatgactttgtcctgacgccgaaagccagcaatggcaatctgaagcagttcaccattaacgtgggacgtgatggcacaatccatcagtttagcgcggtggagcaggacgatcagcgcagcagttatcaactgaaatcccagcaaaatggggctgtggatgcagcgaaatttaccttcaccccgccgcaaggcgtcacggtagatgatcaacgtaagtaaaggcacctgagtgagcaatctgagcctcgattttagcgataatacttttcaacctctggccgcgcgtatgcggccagaaaatttagcacagtatatcggccagcaacatttgctggctgcggggaagccgttgccgcgcgctatcgaagccgggcatttacattctatgatcctctgggggccgccgggtaccggcaaaacaactctcgctgaagtgattgcccgctatgcgaacgctgatgtggaacgtatttctgccgtcacctctggcgtgaaagagattcgcgaggcgatcgagcgcgcccggcaaaaccgcaatgcaggtcgccgcactattctttttgttgacgaagttcaccgtttcaacaaaagccagcaggatgcatttctgccacatattgaagacggcaccatcacttttattggcgcaaccactgaaaacccgagctttgagcttaatagcgcactgctttcccgtgcccgtgtctatctgttgaaatccctgagtacagaggatattgagcaagtactaactcaggcgatggaagacaaaacccgtggctatggtggtcaggatattgttctgccagatgaaacacgacgcgccattgctgaactggtgaatggcgacgcgcgccgggcgttaaatacgctggaaatgatggcggatatggccgaagtcgatgatagcggtaagcgggtcctgaagcctgaattactgaccgaaatcgccggtgaacgtagcgcccgctttgataacaaaggcgatcgcttttacgatctgatttccgcactgcataagagcgtacgtggtagcgcacccgatgcggcgctgtactggtatgcgcgaattattaccgctggtggcgatccgttatatgtcgcgcgtcgctgtctggcgattgcgtctgaagacgtcggtaatgccgatccacgggcgatgcaggtggcaattgcggcctgggattgctttactcgcgttggcccggcggaaggtgaacgcgccattgctcaggcgattgtttacctggcctgcgcgccaaaaagcaacgctgtctacactgcgtttaaagccgcgctggccgatgctcgcgaacgcccggattatgacgtgccggttcatttgcgtaatgcgccgacgaaattaatgaaggaaatgggctacgggcaggaatatcgttacgctcatgatgaagcaaacgcttatgctgccggtgaggtttacttcccgccggaaatagcacaaacacgctattatttcccgacaaacaggggccttgaaggcaagattggcgaaaagctcgcctggctggctgaacaggatcaaaatagccccataaaacgctaccgttaatgttatcgttgcggtaatgttgttactgtatccctgtggtcgcaggctgtggccacatctcccatttaattcgataagcacaggataagcatgctcgatcccaatctgctgcgtaatgagccagacgcagtcgctgaaaaactggcacgccggggctttaagctggatgtagataagctgggcgctcttgaagagcgtcgtaaagtattgcaggtcaaaacggaaaacctgcaagcggagcgtaactcccgaagcaaatccattggccaggcgaaagcgcgcggggaagatatcgagcctttacgtctggaagtgaacaaactgggcgaagagctggatgcagcaaaagccgagctggatgctttacaggctgaaattcgcgatatcgcgctgaccatccctaacctgcctgcagatgaagtgccggtaggtaaagacgaaaatgacaacgttgaagtcagccgctggggtaccccgcgtgagtttgactttgaagttcgtgaccacgtgacgctgggtgaaatgcactctggcctcgactttgcagctgcagttaagctgactggttcccgctttgtggtaatgaaagggcagattgctcgcatgcaccgcgcactgagccagtttatgctggatctgcataccgaacagcatggctacagtgagaactatgttccgtacctggttaaccaggacacgctgtacggtacgggtcaactgccgaaatttgctggcgatctgttccatactcgtccgctggaagaagaagcagacaccagtaactatgcgctgatcccaacggcagaagttccgctgactaacctggtgcgcggtgaaatcatcgatgaagatgatctgccaattaagatgaccgcccacaccccatgcttccgttctgaagccggtagttatggtcgtgacacccgtggtctgatccgtatgcaccagttcgacaaagttgaaatggtgcagatcgtgcgcccagaagacagtatggcggcgctggaagagatgactggtcatgcagaaaaagtcctgcagttgctgggcctgccgtaccgtaaaatcatcctttgcactggcgacatgggctttggcgcttgcaaaacttacgacctggaagtatggatcccggcacagaacacctaccgtgagatctcttcctgctccaacgtttgggatttccaggcacgtcgtatgcaggcacgttgccgcagcaagagcgacaagaaaacccgtctggttcataccctgaacggttctggtctggctgttggtcgtacgctggttgcagtaatggaaaactatcagcaggctgatggtcgtattgaagtaccagaagttctgcgtccgtatatgaacggactggaatatattggctaatacccaatttttctgaatctaaaaagcgcctgcgggcgctttttttgtctccctttgataccgaacaataattactcctcacttacacgtaatactactttcgagtgaaaatctacctatctctttgattttcaaattattcgatgtatacaagcctatatagcgaactgctatagaaataattacacaatacggtttgttactggaatcaatcgtgagcaagcttgagtgagccattatgaaaacgaaaatccctgatgcggtattggctgctgaggtgagtcgccgtggtttggtaaaaacgacagcgatcggcggcctggcaatggccagcagcgcattaacattaccttttagtcggattgcgcacgctgtcgatagcgccattccaacaaaaagtgacgaaaaggttatctggagcgcctgtacagttaactgtggtagtcgctgcccgctacgtatgcacgtcgtggacggtgaaatcaaatatgtcgaaacggacaataccggcgatgacaattacgacggcctgcaccaggttcgcgcctgcctgcgtgggcgttccatgcgtcgccgtgtctacaatccggaccgcctgaaatatccgatgaaacgagtcggggcgcgcggtgaaggcaaattcgagcgcattagctgggaagaagcctacgacatcatcgcgaccaatatgcagcgcctgatcaaagagtacggcaacgagtctatctatctgaactatggcaccggtacgctgggcggcaccatgacccgctcctggccgccgggaaataccctggtcgcgcggctgatgaactgctgcggcggctatctgaaccattacggcgactactcctccgcgcaaattgcggaaggtttgaactatacctacggcggctgggcagatggcaacagcccgagcgatatcgaaaacagtaagctggtagtgctgtttggtaataaccctggcgaaacgcgaatgagtggcggtggggtgacttactatcttgaacaggcacgccagaaatctaatgcccgcatgatcatcatcgatccgcgctataccgacaccggtgccgggcgcgaagatgagtggatccctattcgtccgggaacagatgccgcactggttaacggtctggcgtacgtcatgatcactgaaaacctggtggatcaggcattcctcgataaatattgcgttggctacgatgagaaaaccctgccagccagtgcgccgaaaaatggccactataaagcttatattctgggtgaagggccagatggcgtggctaaaacgccggaatgggccagccaaatcactggtgttccggcagacaaaatcatcaaattggctcgtgaaatcggtagtaccaaaccggcgtttatcagccagggatggggcccgcagcgtcacgctaacggtgaaatcgcaacccgtgctatcagcatgctggcgattctgaccggtaacgttggtattaacggaggcaacagcggcgcgcgtgaaggtagttacagcttaccgtttgtccgtatgccgaccttggaaaacccgatccagaccagcattagcatgtttatgtggaccgatgccattgaacgtggcccggaaatgacggcgctgcgtgatggtgtacgcgggaaagataagctggatgtgccgatcaaaatgatctggaactatgccggtaactgcctgattaaccagcattctgaaatcaaccgtacccatgaaatccttcaggatgataagaagtgcgagctgattgtggttatcgactgccacatgaccagtagcgcgaaatatgctgacatcctgctgcctgactgcaccgcttccgaacagatggactttgcgctggatgcatcctgcgggaatatgtcttacgtgattttcaacgatcaggtgattaaaccgcgctttgaatgtaagaccatctatgaaatgaccagcgaactggcaaaacgtcttggcgttgagcaacagtttactgaaggccgtacccaggaagagtggatgcggcatctgtatgcccagagccgggaagcgattcctgaactgccaacgtttgaagagttccgcaagcaggggatctttaaaaagcgcgacccacaagggcatcacgttgcttataaagccttccgtgaagatccgcaggcaaacccactgactacgccaagcggcaaaattgagatttatagccaggcgctggctgacattgccgctacctgggaattgcctgaaggcgatgtgatcgatccactgccgatctacacgccgggctttgaaagttatcaggatccgctgaacaaacagtatccgctgcagcttacaggtttccactataaatctcgcgttcacagtacttacggcaacgttgatgtgctgaaagcggcttgccgtcaggaaatgtggatcaacccgcttgatgcccaaaaacgcggtatccacaacggcgataaagtcaggatctttaacgatcgtggtgaggttcatattgaggcgaaagtgacgccacgaatgatgccgggtgtggtcgcactgggtgaaggtgcctggtatgacccggatgcaaaacgtgtcgataagggtggttgtattaacgtactgaccactcaacgtccgtctcctctcgctaaggggaatccgagtcatacaaaccttgttcaggttgaaaaggtgtaaggagtaaccgatgacaacccagtatggattttttattgattccagccgttgcaccggttgcaaaacctgcgagctggcctgtaaagactacaaagatttgacgccagaagtcagcttccgccgcatttatgaatatgctggcggcgactggcaggaagataacggtgtctggcaccagaacgtgtttgcctactatctgagcattagttgtaaccactgcgaagatccggcttgtactaaagtctgcccgagcggtgcgatgcataaacgtgaagatggttttgttgtggtcgatgaagatgtgtgcattggctgccgctactgccatatggcttgcccgtatggcgcaccgcaatataacgaaacgaaaggccatatgaccaaatgcgatggttgttatgaccgtgttgcggagggtaaaaagccgatctgtgttgaatcttgtccgctgcgggcgctggatttcggccctatcgacgagctgcgtaaaaaacatggcgatctggcggccgttgcgccgttgccgcgagctcactttaccaaaccgaatattgtgatcaaacccaatgccaatagccgcccgaccggggataccactggctatctggcaaacccgaaggaggtgtgagatgggaagtggatggcatgaatggccgctgatgatcttcacggtcttcgggcaatgtgtagcaggtggttttatcgttctggctttggcgctgctcaaaggcgacctgcgagcagaagcccagcagcgtgttatcgcctgcatgtttggtttatgggtgctgatgggcattggctttatcgcctctatgctccatcttggtagtccaatgcgcgcttttaacagcctcaaccgggtaggggctagtgcactcagtaacgaaatcgccagcggtagcatcttttttgccgtaggcggcatcggctggttgctggcaatgctgaaaaagctgagtccggcattgcgtacgctgtggctgatagtgacgatggttcttggcgtcatctttgtctggatgatggtgcgtgtgtataacagcattgataccgttccgacctggtacagcatctggacgccgatgggcttcttcctgacgatgtttatgggcggcccgttactgggttacctgttgttgagtctggctggcgtcgatggctgggcgatgcgtctgctgccagcaatttctgtactggcactggtagtgagtggcgtggtgagtgtgatgcagggcgcagagctggcgactattcatagttctgtgcagcaggccgcagcgctggtgccggactatggtgcgctgatgtcctggcggatcgtgcttttggccgttgccctgtgcttgtggattgcaccacagctaaaaggttatcagcctgcggttccgctactttctgtaagtttcattctgcttctggcaggggaattaatcggtcgcggcgtattctatggtttgcatatgaccgtggggatggccgtcgcaagctaatcataacaaccggggtttcggccccggttctcttttatttctgcttcgttaacgtgtcataactggtcatcaaattacgataatcaggaatgtggttagagaacaacgtcgccagtccttcaatatcattacgccagtcgcgatgcagctcgcacgccacgccgaaccatgtcatcaattgcgcaccagcttggctcaagcgatcccatgcgctatgccgggtaatttcattaaaggtcccactcgcgtcagtcacgacaaagacgtcaaacccttcttcaatggcactaagcgccgggaatgccacgcaaacttcggttaccacaccggcaataattaactgttttttacctgtcgctttgacagcttttacaaaatcttcgttatcccaggcgttaatatttcccgggcgagcaatgtaaggtgtatcggggaattgtgctttcagttctggaactaatgggccgttaggaccggtttcaaaactggtggtaagaatagttggtaagttgaaatacttagccaggtcacccagcgccagcacgttatttttaaacttatcgggttcgatatcccgtacaagggaaagtaaaccagcctggtgatcaacaagcaaaacggcagcatcatttttatcaagacgaacatacggtttggtcatcctcttctcctttcgagagtcagtggtacgtctgaaatcgatcagacgcgatgcattgctctgaaagcatagacgggaaatatgagtttgctgtgaccatgaaatttttcgactgaacgaagcgtatgaaatttgtgttagttcaataaaaacaatcagatgagactaatcatctcttcagcattagcgttatgaatgagtaatataaatcgataataccgccgctgggatatcgcgtattttcacccattgacaatgtttttggcggtggcatgatgcgcatgaaatttgaacttcctcacggttttaattcatgtccacgtatacccagcctgtcatgcttttgctgtctggcctgcttttgttgactctggcgattgcggtgttaaatacactcgtgccgctttggctcgcccaggaacacatgtccacatggcaggtaggcgttgtcagcagttcctattttaccggcaaccttgtcggtacattgctgacagggtatgtcattaagcgcattggctttaaccgcagctattatctggcctccttcatttttgccgctggctgtgccggccttggcctgatgattggattctggagctggttggcttggcgttttgtcgcgggcgtcggctgtgccatgatttgggtggttgttgagagcgcgctgatgtgcagtgggacgagtcgtaaccgtgggcgtttgcttgctgcgtatatgatggtttattacgtgggaacgtttttaggccagttactggtcagcaaagttagtaccgagctgatgtccgtattgccgtgggttacaggtttgacgttggcagggatcttaccgctgttgtttacgcgtgtgctgaatcagcaggctgaaaaccatgatagcacgagtattacgagtatgctaaaactccgtcaggcgcggcttggcgtgaatggctgcattatcagtggaatcgttctgggatctctatatggcctgatgccgctgtacctcaatcacaaaggggtgagcaatgccagcattggtttctggatggcggtactggtcagtgcgggtatccttggacaatggccgattggacgtctggcggataagtttggtcgactgctggtgttgcgtgttcaggtctttgtcgtcattctcggcagtatcgcgatgcttagccaggcggcgatggccccagcgttattcatcctcggtgccgctggctttacgctatatccggtggcgatggcatgggcttgcgagaaagttgaacatcatcaactggtggcgatgaaccaggccttactgttgagctatactgtgggaagtctgcttggcccgagttttaccgctatgctaatgcagaatttctccgataatttattgtttatcatgatcgccagcgtaagctttatctatttgctgatgctgctgcgcaacgccggtcatacgccgaaacccgttgctcacgtgtaaatgaattcaagcagagtgtgaacttactgtttcacactctgcttttttgtttcttctatctgacttgctttattccaaattttattcgtttaaaaataaaatgtgcagcaggttataattttgcatttcgctatttccgcacttcttatttgccgcgcataatccctcgttttaccgatgcccctttaattttggcgaaggatttgtctatggctgggaatgttcaggaaaaacagttgcgatggtacaacattgcgctgatgtcttttatcactgtctggggttttggcaacgttgttaataactatgccaaccaggggctggtggttgtttttagttgggtgtttatctttgcactctatttcacaccttatgcgctaattgttggtcagttaggcagcaccttcaaagatgggaagggcggggtcagtacctggattaaacacacgatgggacccggactggcttatctcgccgcgtggacctactgggtggtgcatattccctatctggcacaaaaaccccaggcaattctgattgcgctcggttgggcgatgaaaggcgacggtagcctaatcaaagaatatagtgtcgtagcgttacaggggttaacgctggtgctgtttatcttctttatgtgggttgctagtcgcggtatgaaaagcctgaaaatcgtcggttctgtggcagggattgctatgtttgttatgagtctcctgtatgtggcgatggcggtaaccgcgcctgcaattactgaagtgcatattgcgaccacaaacattacctgggaaacgttcattcctcatatcgactttacctacattaccactattagtatgctggttttcgcggttggcggagcagagaagatttctccttacgttaatcaaacgcgcaacccaggaaaagaatttccaaaagggatgttatgcctggcggtgatggttgcggtttgtgccattctgggcagcctggcgatggggatgatgtttgatagccgtaatatcccggatgacttaatgaccaacggtcagtattacgcctttcagaagctgggcgagtattacaacatgggtaatactttaatggtgatttacgccattgcgaataccctgggacaagtagcggcgctggtattcagcattgatgccccgcttaaagtgctattaggtgatgctgacagcaaatatattccagccagtttatgtcgtaccaacgcttctggtacgcccgttaatggctattttctgaccctggtactggtggcgattctgattatgctgccgactctcggcattggtgatatgaacaatctctataaatggctgttgaaccttaatagcgtagtgatgccgctgcgttatttatgggtatttgttgcatttattgcagtcgttcgcttggcgcagaaatataaaccagaatatgtctttattcgtaataagcctctggcaatgaccgtcgggatttggtgttttgcctttaccgcctttgcctgtttgacggggatcttcccgaaaatggaagccttcactgcagagtggaccttccagttggcgctgaatgttgcaacgccgtttgtgctggtaggattaggactgatattcccgctgctggcgcgtaaagcgaatagtaaataattattgtggtcggtgacgctgactctggcagatctgacccgtttttacataatcgagaaatgcgcgcaagccgcaggacatatactggcggtttggataatagatctggaagcctggacgctctgtgctccagtcttccagtacacattctaaacgaccagtatcaaggtactccttgatctgttcatagagcagatacccgataccagcacccatcaaaacggcctccagttcagcatcaacatcatccagaatgatatttcctgcgacagcaatttccagctcctttgcaaattgccagtggaaaggtttgccgctgggataacgaaaaacaacacattgatgattaagcagatcatgaggatggcggggtttgccatatcttgcaaagtactctggcgttgctgctacacataatttcactggcgggccgatcgccacgctgatcatatctttttcgacgatgcaactaagtcgaacgccagcgtcaaagccctgttggacgatatcgacaagagagtcgtcagttgtgagctcgactttaatatcaggatattcacgtgtgaaaccaaccagtaaagacattaaaaatatacgtgcagctacccgggcggcattgattttgagcgttcctgtcggtgtcagacgaaaatcattcatctcatctaacatgatctgaatttcgtcgaaagctgggcgcaatcgttcatagagattagaacccgcttccgttaagcttacgcttcgggttgtccgattgaataagcgaattttaagacgttgttccagtgttttaatactatggctaatggcggagctggataagcctaactcatcgcccgctgcacgaaagctttgattacgggccacggcaaagaaagtggcaaagtcagacatattcatccgcattagtgaaaatccttcattaactcatcctgaatcatcacgtttacaggattatgccgcctgcgtaaagtgcgctccagaacttaacgtggaggtaaaattatgcagtctgaacgtatttatttggtatgggcccatcctcgtcatgatagtttgaccgcacatattgctgatgcgatccatcagcgggcaatggagcggaaaatacaggtgacggaactcgatttatatcggcgtaatttcaacccagtgatgacgccggaagatgaaccagactggaagaatatggataaacgttattctccagaggttcatcagctttatagtgagctgcttgaacatgacacgttagtggtggtttttcctctctggtggtacagcttcccggcaatgctaaaaggatatattgacagagtatggaataatgggctggcttatggagatgggcacaaattaccattcaataaagttcgttgggtggcgctggttggaggagacaaagaaagttttgtccagatgggctgggaaaaaaatataagcgattatttaaaaaatatgtgcagttatcttggtattgaagatgccgatgtcactttcttgtgtaatacagtggtattcgatggggaagaacttcacgcgagctattatcagagcttattatctcaggtacgggatatggtagatgcactataagatgtgttaaaaacgctgtagcagaatgaagcgcggaataaaaaagcggcaactcaataaagttgccgctttacggggaaattagaacattaccttatgaccgtactgctcaagaatgcctttcacgcgttccatggtctctttcttcggtggtttaacaccgtcgagtttgtactcttcacccattgccacccatttgtgtttgcccagctcgtggtaggggagaagctcgattttctcaacgttgcccatatcacgggtaaattcaccgaggcgatgcgcactatcgtcatcgtcagaccagcctgggacaacaacgtagcggatccacaccttcacatttttgttcgccagatatttagcgaactccagcgtgcggtggttggaaactccaaccagattttggtggatctcgtcgttcatctgtttgagatcgagcattaccaggtcggttacttccagcagttcatcaatcaccggatcgtaacgacgaacaaaaccgttggtgtccagacaggtatgaatgccttcttttttgcaggcgcggaaccagtcacgaacaaactcagcttgcaggattgcttcaccgccggatgcggtaacgccgccgccggaagcgttcataaagtggcgataggtcaccacttccttcatcaaatcttcaacggtaacttctttaccgccatgcgtgtcccaggtgtcgcggttatgacaatacaggcagcgcatcaggcagccctggaaaaaggtgataaagcgaatacctgggccgtctacggttccacaggattcaaaggagtgaatgcgaccaataacactcattgcggtgtttctccagatgtggcccatctgaggccgtgttggtgcgcagctcgaaggctacgtcgagtctgttttggcagtcaccttaaagtatagatagctgacaaaaaaggctctcgcgctaaaaaaggccccactttcgtggagcctttattgtacgctttttactgtacgatttcagtcaaatctaattacatagattgagtgaaggtacgagtaataacgtcctgctgctgttctttagtcaggctgttgaaacgtactgcgtagccagatacacggatggtcagctgcggatatttttccgggttttccatcgcgtcgagcagcatttcacggttcatcacgttaacgttcaggtgctgaccaccttcgatggatgcttcgtggtggaagtaaccatccatcagaccagccaggttggtcttacgaacttcgtcgtctttacccagtgcgttcggaacgatagagaaggtgtaggagataccatctttagcgtaagcaaacggcagtttagcaacggaagtcagagaggctactgcacctttctggtcacgaccgtgcatcgggttagcacccggtccgaacggcgcgccagcacgacgaccgtctggggtgttacccgttttcttaccatacacaacgttagaagtgatggtcagaacagactgagtcgggatagcgtcacggtaggtgtgcagtttctgaattttcttcatgaaacgttctaccaggtcaacagccaggtcatctacacgcggatcattgttaccaaactgcgggtattcgccttcgatttcgaagtcgatagccagaccgtcttcgtcacgaatcggtttaactttcgcatatttgattgcagacagggagtcagcagcaacggacagaccagcgataccacacgccatggtgcggataacgtcacggtcgtgcagcgccatcagagaggcttcgtagctgtacttgtcgtgcatgtagtggatgatgttcagtgcagtgatgtactgtttagccagccagtccatgaagtgatccatgcgctccatcacttcatcatagttcaggacatcgcctttgatcggttcagacttcggaccaacctgcattttcagtttttcgtcaacgccgccgttgattgcgtacagcatggttttcgccaggtttgcacgcgcaccgaagaactgcatttgtttaccaacgatcatcgggcttacgcagcaagcaatagcgtagtcatcgttgttgaagtccggacgcatcaggtcatcgttctcatactgcagagaagaggtgtcgatggacactttagcggcgaatttcttgaagttcagcggcagtttttcagaccacagaatggtcatgttcggttccggagacggacccatggtgtacagggtgttcaggaaacggaagctgtttttggtaaccagggtacgaccgtcgaggcccataccaccgatagattcggttgcccagatcgggtcgccagagaacagttcatcgtattccggagtacgcaggaagcgaaccatacgcagtttcatgaccaggtggtcaaccatttcctgcgcttcttgttcggtgatcttgccagctttcaggtcacgttcgatgtacacatccaggaaggtggaggtacgaccgaaggacattgcagcaccgttctgagacttaacagcagccaggtagccgaagtaagtccactggatagcttcctgagcgttggtagccggaccagagatgtcgtagccgtatttcgcagccatttctttcatctgacccagagcgcggtgctgttcagcgatttcttcgcgcagacggatagtctgttccaggtttacgccgttttccagatcagcctgcagagaagtgaactgtgccagtttgtctttcatcaggtagtcgataccgtacagcgcaacgcgacggtagtcaccgatgatacggccacggccatatgcatctggcagaccggtcagaacaccagatttacggcaacgcaggatgtccggagtgtaaacgtcgaacacgccctggttgtgagttttacggtattcagtgaagatttttttgatcatcggatccagttcgcggttgtacgctttgcaggaaccttcgatcattttgataccaccgaacgggataagagcacgtttcagcggagcttcagtctgcagaccaacgattttctcaagctgcttgttgatgtagccagcgtcgtgagaggtgatggtggaagcaacagcggtgtcaaagtcaactggcgcgtgagtgcggttttccagtttaacgccttccattactttgtcccacagggtggtggtcgcttcagtagcgccagccaggaaggactcgtcaccctcgtacggagtgtagtttttctgaatgaagtcacggacgtttacttcattctgccagtcacctttggtaaaaccttcccaggctgtggctaacttttcattaagctcggacatgtaacacctaccttcttaagtggattttttatttactgcgtacttcgacaaccattaatggtggtcgttttcacgcaggtaaatgacccagtatgtcaacccaaccaacaaaccaccaccgataatgttgccgatcgtaaccggaatcaggttatcagtgatgaaattcatcacggtcaggtgagaaaaattttccggtgcagaaccgactgcggtccaaaattccggggatgcgaagtcgcggattacaatacccatcgggatcataaacatgtttgcgatactgtgctcaaaaccgctggcaacaaacatcgcgaccggcagcaccataatgaacgctttgtccatcaggctgcggccagaataactcatccatactgccagacataccatcaggtttgccaggataccaagacagacggcctcaataaaagtatggtgcactttgtggtcggcggtttgtaggacgtttagtccccattgaccatttgcggtcatatactcgccggaaagccacattaaaagtacaaacagcagtgcgccgaccaggttgccaaaatagacatttagccagtttttcgccaactgaccccaggtgatgcgcccactcgccttagcaacaacaatcaacacggtggaagtaaagagatcggctccgcagacaacacaaagaatcagccccagagagaagcaaatgccgccaaccagttttgccatgccgaagggcattgtgcctgtgccagtggttgctgtgatatagaagacgaatgcgatactgatgaaaacaccggcggtaatcgccagatagaaagtcttaagcggatgtttcgttgctttatagacacccgcctcttcggccactttggccattgcagcaggaagtaaaagatcaaaagggttgtcagctttcacactaactctctctttattaagtcggcgacgagatactaacaaagcattatagatgagaaattgatatagatcatatctcgcctggcttataggcccgtaactcgcatggtttttatgcaaatacggagtaaatatttgattatccaaataaaaataaattttaaaaattaacaaatgagttgaattttttccgcatcctccgctaaaacagttaattaaaagggagcatcaggcgaataaagtaacaatatcgatcgtatttattaaatacaaattaccgatatttaaccttataattacaattattttattaatgcaaatatatgtaaagcggggcattaaaaaaacgccccgtaatataactcagactaatcattaagcctacattgcgtaggctatttgattttattttgcccagaatgctgctttggcgcgctgcagcttttcgtaggccttcaacaagctctgatgtgcagcaaacgcgtgcagatcgctatctaccggttgcaggccgtaaaacgccgcttcgccgctcattgccgcactggcggcttctacggcatctgcgccgtacatgcgaacaaacgcattcagatattgcagcggctggcgatcttcttcctgtgccagtaataacaacgtttgcaggcagcgataatagttggcgcgttccggactaaatacactactgttaaactccatcgtccattcggtccagaccagagcctgttccagatcgccaccagccagcgccagcatggcttttaattcaccgatacgcagggtgtaccaaccgttatcgctcccggtcgccagacccaacagctcacgcacgcgggtaaagtcatcaaaaccttcttcatccagttgctcgatgaggttcaggtaatcttctttttcccactcgctgcctggtaggctaagaatcgtttcacgtaaatggctgcccatactgttattcgcgagccacagatcttcagccggataaatatcggacatgccaggcacgataatacggcaagcataaacgcccagatgctcgtaatcggcaatataaacttctttatcttctttgttgaagatagccatcagtgtggcgaactcttcttccgtggtgccggagaaattccagtccacaaacggataatcggcatcctgcttgaacaggtcccaggagattaaaccgctggaatcgataaagtgcgtttcgaggttggtatgttcagcgacttcttcatcatcgaaggttggcggagtaaacacatccaaatctttcaggccacgaccttgcagcagctcggtcacggtacgttccagtgctacgccaaaatcaggatgcgcaccgaaagaggcaaagcaggtaccgttagcaggattgaacagtaccacgcaaatcaccggatactggccgccaaggctaccgtcataagcgaagattgggaaaccctccgcttccagcgtttcgatggcttcaactactgctgggtaacgcgccagcacgtctgccgggatctctggcaggctgatgctttcagcaataatgcggtttttcacgtagcgttcgaaaacttcagacaatccctgaacgcgtgcttcgttgcgggtattacctgcggacataccgttggagacgtacaggttaccaatgatattcatcggaatataaacggtctgattgtcggactgacgcgtaaacggcaggccgcaaataccacgatcttcgttaccggattgtaggtcaatcagcatgctgccggtcagttcattctccggatcataaaacgcgcgcagacggtcatcgagcagcccttctggcacatcgtcattttcggtcagtgggaaccatttttcgttgggataatgcacgaacggaccgttggcgatggtttcgcccagccagaagtccgcaaaaaagtagttggtactgagacgctcgaaatattcaccgagtgcagaagccagcgccgctttcttggttgcgcctttaccgttggtaaaacacagtgcgcactctttgtcgcgaatatgtacagaccagacgttaggcacgggattcagccaggaggcctcttcaatctgaaagccgaggtcactaagtttttgctggaagcgagcgatggaatcttccagagcggcatctttgccggggataaatgtttgcgtcatgaaaatcactttagtcgtacggaaagcgcgcaataatacgggttttatctcaaaggcgctatcaccgccgccatgccgatgaactgttgactatgcttttagcggataaaccacgttaagagcataaaaatgaaggcgttcgatctccaccgtatggcatttgataaagtgccttttgatttccttggcgaagttgcactacgtagtctttatacctttgtactggtctttttgttcctcaaaatgaccggaagacgcggtgtgcggcagatgagcctgtttgaagttttaatcattctgacgctgggaagtgcggcgggagatgtggcgttttatgatgatgtgccgatggtcccggtacttatcgtctttattactctggcgttgttataccgcctggtaatgtggttgatggcgcacagtgaaaaactggaagatcttctggaaggcaagccagttgtcattattgaagatggcgagctggcctggagcaaactcaataactccaacatgacggaatttgagttctttatggagctacgattgcgtggcgtggagcagctggggcaggtacgtctggcgattctcgaaaccaacgggcaaatcagtgtctatttctttgaagatgacaaggtgaaaccgggtttacttattttacccagtgattgtacgcagcgttacaaagtggtgccggagagcgcggactatgcctgtattcgttgtagtgaaatcattcatatgaaagcgggggaaaaacaattatgtccgcgctgtgcaaatccagaatggacgaaggcaagtcgggcaaaacgggtgacctgacagtaaaaacatcggctttttgctaataatccgagagattcttttgtgtgatgcaagccacatttttgccctcaacggttttactcattgcgatgtgtgtcactgaatgataaaaccgatagccacaggaataatgtattacctgtggtcgcaatcgattgaccgcgggttaatagcaacgcaacgtggtgaggggaaatggctcaaatcttcaattttagttctggtccggcaatgctaccggcagaggtgcttaaacaggctcaacaggaactgcgcgactggaacggtcttggtacgagcgtgatggaagtgagtcaccgtggcaaagagttcattcaggttgcagaggaagccgagaaggattttcgcgatcttcttaatgtcccctccaactacaaggtattattctgccatggcggtggtcgcggtcagtttgctgcggtaccgctgaatattctcggtgataaaaccaccgcagattatgttgatgccggttactgggcggcaagtgccattaaagaagcgaaaaaatactgcacgcctaatgtctttgacgccaaagtgactgttgatggtctgcgcgcggttaagccaatgcgtgaatggcaactctctgataatgctgcttatatgcattattgcccgaatgaaaccatcgatggtatcgccatcgacgaaacgccagacttcggcgcagatgtggtggtcgccgctgacttctctagtaccattctttcccgtccgattgacgtcagccgttatggtgtaatttacgctggcgcgcagaaaaatatcggcccggctggcctgacaatcgtcatcgttcgtgaagatttgctgggcaaagcgaatatcgcgtgtccgagcattctggattattccatcctcaacgataacggctccatgtttaacacgccgccgacatttgcctggtatctatctggtctggtctttaaatggctgaaagcgaacggcggtgtagctgaaatggataaaatcaatcagcaaaaagcagaactgctatatggggtgattgataacagcgatttctaccgcaatgacgtggcgaaagctaaccgtagccggatgaacgtgccgttccagttggcggacagtgcgcttgacaaattgttccttgaagagtcttttgctgctggccttcatgcactgaaaggtcaccgtgtggtcggcggaatgcgcgcttctatttataacgccatgccgctggaaggcgttaaagcgctgacagacttcatggttgagttcgaacgccgtcacggttaatgccgaaattttgcttaatccccacagccagcctgtggggtttttatttctgttgtagagagttgagttcatggaatccctgacgttacaacccatcgctcgtgtcgatggcactattaatctgcccggttccaagagcgtttctaaccgcgctttattgctggcggcattagcacacggcaaaacagtattaaccaatctgctggatagcgatgacgtgcgccatatgctgaatgcattaacagcgttaggggtaagctatacgcttagtgccgatcgtacgcgttgcgaaattatcggtaacggcggtccattacacgcagaaggtgccctggagttgttcctcggtaacgccggaacggcaatgcgtccgctggcggcagctctttgtctgggtagcaatgatattgtgctgaccggtgagccgcgtatgaaagaacgcccgattggtcatctggtggatgcgctgcgcctgggcggggcgaagatcacttacctggaacaagaaaattatccgccgttgcgtttacagggcggctttactggcggcaacgttgacgttgatggctccgtttccagccaattcctcaccgcactgttaatgactgcgcctcttgcgccggaagatacggtgattcgtattaaaggcgatctggtttctaaaccttatatcgacatcacactcaatctgatgaagacgtttggtgttgaaattgaaaatcagcactatcaacaatttgtcgtaaaaggcgggcagtcttatcagtctccgggtacttatttggtcgaaggcgatgcatctagcgcttcttactttctggcagcagcagcaatcaaaggcggcactgtaaaagtgaccggtattggacgtaacagtatgcagggtgatattcgctttgctgatgtgctggaaaaaatgggcgcgaccatttgctggggcgatgattatatttcctgcacgcgtggtgaactgaacgctattgatatggatatgaaccatattcctgatgcggcgatgaccattgccacggcggcgttatttgcaaaaggcaccaccacgctgcgcaatatctataactggcgtgttaaagagaccgatcgcctgtttgcgatggcaacagaactgcgtaaagtcggcgcggaagtggaagaggggcacgattacattcgtatcactcctccggaaaaactgaactttgccgagatcgcgacatacaatgatcaccggatggcgatgtgtttcagcctggtggcgttgagtgatacaccagtgacgattcttgatcccaaatgcacggccaaaacatttccggattatttcgagcagctggcgcggattagccaggcagcctgaatgaacaacgggcaataaatagccaaatctttctttatcaaaacgtcggcacattgtcggcgttttttttcggaccttgtgagtcattttgattaatggtagcgtcgcttgtcaatgtaagttgttgatacataatatttatatatgattaatcaacggatgattcacatgaagaatactaaattactgctggcgattgcgacctctgcagcattactgacagggtgtcaaaatacccacggtattgataccaatatggctatcagctccggtttaaatgcctataaagcagcaacattaagcgatgccgatgcaaaagcgattgccaatcagggctgtgccgaaatggacagcggcaatcaagtcgcaagtaaatccagcaagtacggtaaacgtctggcaaaaatcgccaaagcattgggtaacaatattaatggcacgccggtcaactataaggtttatatgaccagcgacgtcaacgcatgggcgatggcgaacggctgtgttcgtgtctacagtggcctgatggacatgatgaatgacaacgaaattgaaggcgttctgggccatgaactgggccacgtcgcgttgggtcacagcctggctgaaatgaaagcttcttatgcgatcgttgccgcacgcgatgccattagtgctaccagcggtgtggcttcccagctttcccgcagtcaattaggtgatatcgcagaaggcgctatcaatgctaaatactcccgtgataaagagtccgaagcagatgatttctcctttgatctgttgaagaaacgtggcatcagcacccaggggctggttggcagctttgaaacactggctagcctggatggcggtcgcacccagtccatgtttgactctcacccaccaagtacagagcgtgcgcaacacatccgtgatcgtatcgcctctggtaagtaaatcattgtcatctttcgggctggtcttctgccagcccgctataattgcgcaataaatccccatctgaatacagacaaaactggtttttgcacacaacgttaacgatttgtggcgtcggcgcgtataatgcgcgcggttatgttaacggtacgcctgttttaaggagataaagatgacggcaattgccccggttattaccattgatggcccaagcggtgcagggaaaggcaccttgtgtaaggctatggcggaagcgttgcaatggcatctgctggacagcggtgcaatttatcgcgtactggcattggcggcattacatcaccatgttgatgttgcgagcgaagatgcgctggtaccgctggcatcccatctggatgtacgttttgtgagcaccaatggcaatctggaagtgatcctcgaaggggaagatgtcagcggcgaaattcgtactcaggaagtggcgaatgcagctagtcaagtcgcggcattcccacgcgttcgtgaagcattattgcgtcgccaacgcgcgtttcgcgaattaccaggtctgattgccgatggccgcgacatgggaacggtggtattccctgatgcaccagtgaaaattttccttgacgcctccagcgaagaacgtgcgcatcgccgcatgctacagttgcaggagaagggctttagtgttaactttgagcgccttttggccgagatcaaagaacgcgacgaccgcgatcgtaaccgagcggtagcgccactggttccggcagccgatgctttagtgttggattccaccaccttaagcattgagcaagtgattgaaaaagcgctacaatacgcgcgccagaaattggctctcgcataagcgaccgaatttgcagtacccccgttgcaatggaatgacagcgggtatgttaaacaaccccatccggcatggagccaggtggacgttaaatataaacctgaagattaaacatgactgaatcttttgctcaactctttgaagagtccttaaaagaaatcgaaacccgcccgggttctatcgttcgtggcgttgttgttgctatcgacaaagacgtagtactggttgacgctggtctgaaatctgagtccgccatcccggctgagcagttcaaaaacgcccagggcgagctggaaatccaggtaggtgacgaagttgacgttgctctggacgcagtagaagacggcttcggtgaaactctgctgtcccgtgagaaagctaaacgtcacgaagcctggatcacgctggaaaaagcttacgaagatgctgaaactgttaccggtgttatcaacggcaaagttaagggcggcttcactgttgagctgaacggtattcgtgcgttcctgccaggttctctggtagacgttcgtccggtgcgtgacactctgcacctggaaggcaaagagcttgaatttaaagtaatcaagctggatcagaagcgcaacaacgttgttgtttctcgtcgtgccgttatcgaatccgaaaacagcgcagagcgcgatcagctgctggaaaacctgcaggaaggcatggaagttaaaggtatcgttaagaacctcactgactacggtgcattcgttgatctgggcggcgttgacggcctgctgcacatcactgacatggcctggaaacgcgttaagcatccgagcgaaatcgtcaacgtgggcgacgaaatcactgttaaagtgctgaagttcgaccgcgaacgtacccgtgtatccctgggcctgaaacagctgggcgaagatccgtgggtagctatcgctaaacgttatccggaaggtaccaaactgactggtcgcgtgaccaacctgaccgactacggctgcttcgttgaaatcgaagaaggcgttgaaggcctggtacacgtttccgaaatggactggaccaacaaaaacatccacccgtccaaagttgttaacgttggcgatgtagtggaagttatggttctggatatcgacgaagaacgtcgtcgtatctccctgggtctgaaacagtgcaaagctaacccgtggcagcagttcgcggaaacccacaacaagggcgaccgtgttgaaggtaaaatcaagtctatcactgacttcggtatcttcatcggcttggacggcggcatcgacggcctggttcacctgtctgacatctcctggaacgttgcaggcgaagaagcagttcgtgaatacaaaaaaggcgacgaaatcgctgcagttgttctgcaggttgacgcagaacgtgaacgtatctccctgggcgttaaacagctcgcagaagatccgttcaacaactgggttgctctgaacaagaaaggcgctatcgtaaccggtaaagtaactgcagttgacgctaaaggcgcaaccgtagaactggctgacggcgttgaaggttacctgcgtgcttctgaagcatcccgtgaccgcgttgaagacgctaccctggttctgagcgttggcgacgaagttgaagctaaattcaccggcgttgatcgtaaaaaccgcgcaatcagcctgtctgttcgtgcgaaagacgaagctgacgagaaagatgcaatcgcaactgttaacaaacaggaagatgcaaacttctccaacaacgcaatggctgaagctttcaaagcagctaaaggcgagtaattctctgactcttcgggatttttattccgaagtttgttgagtttacttgacagattgcaggtttcgtcctgtaatcaagcactaagggcggctacggccgcccttaatcaatgcagcaacagcagccgcttaatttgcctttaaggaaccggaggaatcatgaccaagagtgaattgatagaaagacttgccacccagcaaagccacattcccgccaagacggttgaagatgcagtaaaagagatgctggagcatatggccagcactcttgcgcagggcgagcgtattgaaatccgcggtttcggcagtttctctttgcactaccgcgcaccacgtaccggacgtaatccgaagactggcgataaagtagaactggaaggaaaatacgttcctcactttaaacttggtaaagaactgcgcgatcgcgccaatatttacggttaagttttttactcaaacttgaacgagagaaaagcacctgtcgggtgcttttttcatttctctaatctggaactggaagctgcctcgcagagttttgaacagttttcaccctttcgttaaattcttctgaatatgcctcggggaacgcaaaattcccaccagacaaccgctcaacaaagttgcacactttccataaacagggaggggtgcatgaaaataacgacagtcggtgtatgcataattagcggaatttttccgttgctgattttgccccaattgcctgggacattaacccttgcgtttctgactctcttcgcctgcgtactggcatttatccctgttaaaaccgtccgttatatcgcgctgacgttgctgtttttcgtttggggcatattaagtgcaaagcaaattttgtgggcaggagaaaccttaactggcgcgacgcaggatgcaattgttgagatcactgcaactgacggcatgaccactcattacggtcaaattactcatctacaaggtcgacgtatattccctgcgagtggtctcgtgatgtatggcgaatatcttccgcaagcggtttgtgctggacaacaatggagtatgaaactcaaagttcgtgcagttcatggccaacttaatgatggcggctttgatagccagcgttatgccattgcccagcatcagccgctcaccggccgttttctgcaggcaagtgtcattgaaccgaattgtagcctgcgtgcacagtatctggcgagtctacaaacaacgctgcaaccctatccgtggaatgcggttattcttggtttaggtatgggggaacggttatccgtccccaaagaaatcaaaaatatcatgcgcgatactggaacggcgcatttaatggcgataagcggattgcacatcgcttttgcggcgttgctggctgccggactcattcgcagtggacaaatttttctgcctgggcgctggatccactggcaaataccattaattggcggaatctgctgtgctgctttttatgcctggttgacgggaatgcaacctcctgcattgcgtaccatggtggcgcttgctacgtggggaatgcttaagttaagtgggcgacagtggagtggctgggatgtatggatatgttgtctggcggcaattttgctgatggatcctgttgccattctcagccaaagtttatggctctctgccgctgcggtcgcggcattgatattttggtatcagtggtttccctgtcctgagtggcaactgccgccggtattgcgtgcagttgtttccctcatccatctgcaactgggaatcacacttctgcttatgcccgtgcaaatcgtcatatttcatggcattagtctgaccagctttattgcaaatctattagcaattcccttggtgacatttatcacggttccgttgatcctcgccgcgatggttgtgcatttaagcgggccgttaatcctggagcaagggttatggtttcttgccgaccggtctttggctttacttttctgggggttaaagagtttgccggaagggtggatcaacattgctgaatgttggcaatggctaagtttttccccatggttcttactggtggtatggcgattaaacgcctggcgaacgttgccagcaatgtgtgtggctggaggcttgctgatgtgctggccgctgtggcaaaaacctcgacctgacgagtggcagctgtacatgcttgatgtcgggcaagggctggcaatggtgatagccagaaacggcaaagcgattctctatgacacaggactggcctggcctgaaggggatagtgggcaacaactgattatcccctggctccactggcataatcttgaaccggaaggcgttattctgagccatgaacatctggatcaccggggagggctggatagtatattgcatatatggccgatgttatggatcagaagtccgttaaactgggaacatcatcagccctgtgtgcgtggcgaagcgtggcaatggcaaggattgcgtttcagcgcgcactggcctttacaaggtagcaacgataaaggaaataaccattcctgtgtggttaaggttgatgacgggacgaatagcattcttctaaccggtgatattgaagccccagctgaacaaaagatgctaagccgttactggcagcaagtgcaggcaacattgcttcaggtacctcaccatggcagtaataccagtagtagcttgccattaattcagcgagtgaatggaaaagtggcactcgcaagcgcaagccgctataacgcatggcgactgccctctaacaaagttaagcatcgctatcaactgcaaggatatcaatggattgatactccacatcaaggtcaaacaacggtcaattttagtgcgcaaggctggcggattagcagcctcagggagcaaattttacctcgttggtatcatcagtggtttggcgtgccagtggataacgggtaaaatatgcggctatttcaacaaatgctggttttttgaatgcataacgacaaagatctctctacgtggcagacattccgccgactgtggccaaccattgcgcctttcaaagcgggtctgatcgtggcgggcgtagcgttaatcctcaacgcagccagcgataccttcatgttaagcctccttaagccacttcttgatgatggctttggtaaaacagatcgctccgtgctggtgtggatgccgctggtggtgatcgggctgatgattttacgtggtatcaccagctatgtctccagctactgtatctcctgggtaagtggaaaggtggtaatgaccatgcgtcgccgcctgtttggtcacatgatgggaatgccagttagtttctttgacaaacagagtacgggtacgctgttgagtcgtattacctacgattccgaacaggttgcttcttcttcttccggcgcactgattactgttgtgcgtgaaggtgcgagcatcatcggcctgttcatcatgatgttctattacagttggcaactgagcatcattttgattgtgctggcaccgattgttagcattgcgattcgcgttgtaagcaagcgttttcgcaacatcagtaaaaacatgcagaacaccatggggcaggtgaccaccagcgcagaacaaatgctgaagggccacaaagaagtattgattttcggtggtcaggaagtggaaacgaaacgctttgataaagtcagcaaccgaatgcgtcttcaggggatgaaaatggttagtgcctcttccatctctgatccgatcattcagctgatcgcctctttggcgctggcgtttgttctgtatgcggcgagcttcccaagtgtcatggatagcctgactgccggtacgattaccgttgttttctctagtatgattgcactgatgcgtccgctgaaaagcctgaccaacgttaacgcccagttccagcgcggtatggcggcttgtcagacgctgtttaccattctggacagtgagcaggagaaagatgaaggtaagcgcgtgatcgagcgtgcgactggcgacgtggaattccgcaatgtcacctttacttatccgggacgtgacgtacctgcattgcgtaacatcaacctgaaaattccggcagggaagacggttgctctggttggacgctctggtagcggtaaaagtaccatcgccagcctgatcacgcgtttttacgatattgatgaaggcgaaatcctgatggatggtcacgatctgcgcgagtataccctggcgagcttacgtaaccaggttgctctggtgagccagaatgtccatctgtttaacgatacggttgctaacaacattgcttacgcacggactgaacagtacagccgtgagcaaattgaagaagcggcgcgtatggcctacgccatggacttcatcaataagatggataacggtctcgatacagtgattggtgaaaacggcgtgctgctctctggcggtcagcgtcagcgtattgctatcgctcgagccttgttgcgtgatagcccgattctgattctggacgaagctaccagcgctctggataccgaatccgaacgtgcgattcaggcggcactggatgagttgcagaaaaaccgtacctctctggtgattgcccaccgcttgtctaccattgaaaaggcagacgaaatcgtggtcgtcgaggatggtgtcattgtggaacgcggtacgcataacgatttgcttgagcaccgcggcgtttacgcgcaacttcacaaaatgcagtttggccaatgatcgaaaaaatctggtctggtgaatcccctttgtggcggctattgctgccactctcctggttgtatggcctggtgagtggcgcgatccgtctttgctataaactaaaactgaagcgcgcctggcgtgcccccgtaccggttgtcgtggttggtaatctcaccgcaggcggcaacggaaaaaccccggtcgttgtctggctggtggaacagttgcaacagcgcggtattcgcgtgggggtcgtaagccggggatatggtggtaaggctgaatcttatccgctgttattgagcgcagataccacaacagcacaggcgggtgatgaacctgtgttgatttatcaacgcactgatgcgcctgttgcggtttctcccgttcgttctgatgcggtaaaagccattctggcgcaacaccctgatgtgcagatcatcgtaaccgacgacggtttacagcattaccgtctggcgcgtgatgtggaaattgtcgttattgatggtgtgcgtcgctttggcaatggctggtggttgccggcggggccaatgcgtgagcgagcggggcgcttaaagagcgttgatgcggtaatcgtcaacggcggtgtccctcgcagcggtgaaatccccatgcatctgctgccgggtcaggcggtgaatttacgtaccggtacgcgttgtgacgttgctcagcttgaacatgtagtggcgatggcggggattgggcatccgccgcgcttttttgccacgctgaagatgtgtggcgtacaaccggaaaaatgtgtaccgctggccgatcatcagtctttgaaccatgcggatgtcagtgcgttggtaagcgccgggcaaacgctggtaatgactgaaaaagatgcggtgaaatgccgggcctttgcagaagaaaattggtggtatttgcctgtagacgcacagcttagtggtgatgaaccagcgaaactgcttacgcaactaaccttgctggcttctggcaactaattacgccgcggcagcgttcgattgatggagtcatgaatgagcctgccgcacctctcccttgctgatgcgcgtaatcttcaccttgccgcacaaggcctgttaaacaaaccccgccgtcgagcgagcttggaggatattccggcaacgatctcccgcatgtccttgctgcaaatcgataccatcaatattgttgcccgtagtccatatctggtgcttttcagtcgtctgggaaattatcctgcccagtggctggatgagtctctggcgcgtggcgaattaatggaatactgggcgcatgaagcctgctttatgccgcgtagcgactttcgtcttattcgccaccgcatgctggcacctgaaaaaatgggctggaaatacaaagacgcctggatgcaggaacatgaggcggaaattgcacagttaattcagcatattcatgataaggggccggtacgtagtgccgattttgagcatcctcgtaaaggtgcaagcggctggtgggaatggaagccgcataaacggcatctggaaggtttatttactgccggaaaggtgatggtgattgaacggcgcaacttccagcgcgtttatgatttaacccaccgtgtcatgcctgactgggatgatgagcgcgatctcgttagccaaacagaagcagaaatcatcatgctggataacagtgcgcgtagcctgggaatattccgcgaacagtggctggcagattactatcggctgaaacgtccggcactggcggcgtggcgcgaagcgagggctgaacagcagcaaatcattgctgtgcatgttgaaaaattgggcaatctttggctgcatgatgatttgctgccgctactcgagcgagcgctggccggaaagctcactgcaacgcacagcgcggtacttagcccttttgatcctgttgtctgggatcgcaaacgcgcagagcagctttttgattttagctaccggctggagtgctataccccagcgccgaaacgccagtatggctattttgttctgccgttattacatcgtgggcaattagttgggcgaatggatgccaaaatgcatcgccagacaggcatccttgaagttatctctctgtggttacaggaaggtattaaaccaacgacaacgctgcaaaaagggctacgtcaggcgattactgatttcgctaactggcagcaggcaacgcgggtgacattaggatgctgcccgcaaggcctctttactgattgccgcaccggctgggaaatagaccccgtcgcataaatgattatgataagatttatgcattcataacccgatccatctggaggaactatggatcatcgtctgcttgaaatcattgcctgcccggtttgcaacggaaaactttggtataaccaggaaaaacaagagcttatttgcaaactggacaacctcgctttcccgctgcgtgatggcattccagtgttgctggaaacggaagcccgcgtgctgactgctgatgagagtaaaagttgatgtaaactgctgatgagagtaaatcatgagttttgtggtcattattcccgcgcgctacgcgtccacgcgtctgcccggtaaaccattggttgatattaacggcaaacccatgattgttcatgttcttgaacgcgcgcgtgaaagtggtgccgagcgcatcatcgtggcaaccgatcatgaggatgttgcccgcgccgttgaagccgctggcggtgaagtatgtatgacgcgcgccgatcatcagagtggaacagaacgtctggcggaagttgtcgaaaaatgcgcattcagcgacgacacggtgatcgttaatgtgcagggtgatgaaccgatgatccctgcgacaatcattcgtcaggttgctgataacctcgctcagcgtcaggtgggtatggcgactctggcggtgccaatccacaatgcggaagaagcgtttaacccgaatgcggtgaaagtggttctcgacgctgaagggtatgcactgtacttctctcgcgccaccattccttgggatcgtgatcgttttgcagaaggccttgaaaccgttggcgataacttcctgcgtcatcttggtatttatggctaccgtgcaggctttatccgtcgttacgtcaactggcagccaagtccgttagaacacatcgaaatgttagagcagcttcgtgttctgtggtacggcgaaaaaatccatgttgctgttgctcaggaagttcctggcacaggtgtggatacccctgaagatcttgagcgcgttcgcgctgaaatgcgctaatttcacttcacgacacttcagccaattttgggaggagtgtcgtaccgttacgattttcctcaatttttcttttcaacaattgatctcattcaggtgacatcttttatattggcgctcattatgaaagcagtagcttttatgagggtaatctgaatggaacagctgcgtgccgaattaagccatttactgggcgaaaaactcagtcgtattgagtgcgtcaatgaaaaagcggatacggcgttgtgggctttgtatgacagccagggaaacccaatgccgttaatggcaagaagctttagtacgcccggaaaagcccgacaactggcatggaaaaccaccatgctggcaagaagtgggactgtccgtatgccgactatttatggtgtgatgacgcatgaagaacaccccggccccgatgtcctgctactggagcggatgcgtggtgttagcgtggaggcaccagcccgaacaccagaacgctgggaacaactcaaagaccaaatcgttgaagccttactggcctggcaccgtcaggacagtcgcggttgcgtcggcgcggtcgacaatactcaggaaaatttctggcccagttggtaccggcaacatgttgaagtgctatggaccacgctcaatcagttcaataacaccggtctgacgatgcaggataagcggatcctgtttcgcactcgcgaatgtctcccggcattatttgaaggctttaacgacaattgtgtgctgattcacggtaacttctgtttacgcagcatgttgaaagatagccgcagcgatcagttactggcgatggtcgggccgggactaatgctttgggcaccgcgagaatacgaactgttccgactaatggataattctctggcggaagatttgctctggagttacctgcaacgcgcgccagtggcggagagcttcatctggcggcgttggttgtatgtgttatgggatgaagttgcgcaactggttaataccggacgatttagtcggcgcaacttcgatctggcaagtaaaagtctcttgccgtggctcgcctgatcactcttgccgtggctcgccactgctaccttttagccactgccagatacggccaagcgtttcatagccaacacgatcgctatgcatcaaccagaccggagaagggattgcccgttcccacgggttaagcgggctgtcgatggccaactgattcgccggggctggtagcggatttaacccttcctgctgaaaaaagatcatcgcccgcggcagatgacttgcggaggtcaccagcaggaaaggggcgtcaccaatcgcctgtttcactgctgcagcttcttcttcggtatcttttggcaaatccagggtgataatttgctcgcgcggcacgcccaggctttgcgcaactctggcacctacttccgctgtactcaccgtattggtttttgctacgcctcccgtgaagatcagtttacttcccggattttcgcgccataagcgaataccttcattcaggcgtggcagactgttattgattaaattagagctcggtgcccactgcgggttccaggtataaccacctccgagcaccacgatatagtccactttttggctattattccatgtcggataggtgctttcgatgggacgcagcaggcggtcggctaccggttgcaaactcaataacaagagcgccagccacccaatgctaataaaaatcttcccggttttttgaaaacggctaaaccacagcagcgccaggccagcgccaataatcaacaacatcagcggaagtggcagcaacatattgccaatcacttttttcagtgtaaaaagcatcctttctggttccttttttaaccatatagcaagggatcgccagcgatattacaccagacgggttcattctcgccgtggctgtgacaaaatagcgtctttatcagaaaacgtcttagccaaccggtggagaaagcaatgcaggatcgcaattttgatgatattgcggaaaagttttcccgtaacatttacggcaccaccaaagggcagcttcgacaggctattctgtggcaggatctcgatcgcgtgctggcggaaatgggcccgcaaaaactgcgtgtgctggatgctggcggtggagaagggcagaccgcaatcaaaatggccgagcgtgggcatcaggtcattttatgcgatctttctgcgcagatgatcgaccgcgcaaaacaggcggcagaagcaaaaggtgtgagcgacaacatgcaatttatacattgcgccgctcaggatgttgctagccatttggaaacgcccgttgatctgatattgttccatgcggtgctcgagtgggtggctgatccccgcagcgtattgcagaccctctggagtgtgttgcgtccaggcggcgtgttgagcttaatgttctacaatgcgcatggtttgttgatgcataacatggtcgccgggaattttgattacgtgcaggcgggaatgccgaaaaagaaaaaacggacgcttagcccagattatccacgcgacccggcgcaggtttatctgtggctggaagaagctggttggcaaattatgggtaagacaggcgttcgcgtgtttcatgattatctgcgcgagaaacaccagcagcgcgactgctatgaagcattacttgaattagaaacgcgttattgccgtcaggaaccgtatattaccctggggcgttatattcatgtcaccgcgcgcaaaccgcagagcaaggataaagtatgagtgaattttcccagacagtccccgaactggttgcctgggccagaaaaaatgacttctccatcagcctgccggtagaccgactctcttttctgctggcggttgccacgctgaacggcgagcgtctggatggtgagatgagtgaaggcgagctggtggatgcattccgccatgtgagtgatgcgtttgagcaaaccagcgaaaccatcggcgtgcgcgccaataacgcgatcaacgacatggtgcgtcaacgtctgctgaaccgctttaccagcgagcaggcggaagggaacgcaatttaccgtctgacgccgctcggcatcggcattactgactactacatccgtcagcgcgagttttctacgctgcgtctttctatgcagttgagcattgtggcgggtgagctcaaacgcgcagcagatgccgccgaagagggcggtgatgaatttcactggcaccgtaatgtctatgcgccactgaaatatagcgtagcagaaattttcgacagtatcgacctgacgcaacgtctgatggacgaacagcagcagcaggtgaaggacgatatcgcccagttgctgaacaaagactggcgggcggcgatttccagctgtgaattgttgcttagcgaaacttccggaacgctgcgtgaattgcaggatacgctggaagcggcaggcgacaaattgcaggctaatctgttgcgcattcaggatgcgacgatgacccatgacgatctgcatttcgtcgatcgtctggtgttcgatctgcagagcaaactcgatcgtattatcagttggggccagcaatccatcgacttgtggattggctacgaccgccacgtacacaaatttattcgtaccgcgatcgatatggataaaaaccgcgtctttgctcagcggttacgtcagagcgtacaaacctattttgatgagccgtgggcgctaacttatgccaatgccgatcgtctgctggatatgcgtgacgaagagatggcactgcgcgatgaagaagtgactggggaacttcctgaggatctggaatacgaagagtttaacgagatccgcgaacagctggcggcgatcatcgaagaacaacttgccgtgtacaaaaccagacaagtgccgctggatcttggtctggtggtacgcgaatatctgagtcagtatccgcgtgcacgtcactttgacgttgcgcgtattgttattgatcaggcggtacgtcttggcgtagcgcaagcagatttcaccggactgccagcgaaatggcagccgattaatgattacggagccaaggtacaggcgcatgtcatcgacaaatattgaacaagtgatgccggttaagctggcgcaggcgctggcgaatccgttatttccggcgctggacagcgccttacgtagtggacgccatattggcctcgacgaactggataatcatgcattcctgatggattttcaggaatatctggaagagttttacgcgcgttataacgttgagcttattcgcgcaccagaagggttcttctatttacgcccacgttccaccacgctgatccctcgttccgtcttgagcgaactggatatgatggtcgggaaaatcctctgttatctctatctcagcccggaacggctggcgaatgaggggattttcacccagcaggaactgtacgacgaactgctcaccctggccgatgaagcaaaactgctgaaactggtgaacaaccgtagtaccggtagtgacgttgaccgtcagaagttgcaggagaaagtacgttctagcctcaaccgtctgcgtcgtttaggcatggtgtggtttatgggccacgacagcagcaagtttcgcattaccgaaagcgtgttccgcttcggagccgatgtgcgtgctggcgacgatccccgtgaagcacagcgtcgcctgattcgtgatggcgaagcaatgccgattgaaaatcatctgcaactcaacgatgaaaccgaagagaatcagccagatagcggagaggaagaataatgattgaacgcggtaaatttcgcagtctgacgctgattaactggaacggcttttttgcccgaacttttgaccttgacgagctggtcacgacgctttctggcggtaacggggcgggtaaatccaccaccatggcggcgttcgttacggcgctgatccccgacctgaccctgctgcatttccgtaacactacggaagccggggccaccagcggtagccgcgataaaggtctgcacggtaagctgaaagcgggtgtctgttatagcatgctcgacaccattaacagccgccaccagcgcgtggtggtcggtgtgcgtctgcaacaggttgccggacgcgatcgtaaagtggatatcaagccgtttgccattcagggactgccgatgagcgtgcagccgacacagctggtgaccgaaaccctgaacgaacgccaggcgcgcgtgctgccgcttaacgagctgaaagacaagctcgaggcgatggaaggcgtgcagtttaaacagttcaactccattactgattaccacagcctgatgttcgatctgggcatcatcgcgcgtcgtctgcgctccgcatctgaccgtagcaaattctatcgtctgatcgaagctagcctgtatggcgggatctccagtgccattacccgttctctgcgcgactacctgttgccagaaaacagcggcgtgcgtaaagcgttccaggacatggaagcggcgctgcgtgaaaaccgtatgacgctggaagcgattcgtgtcacccagagcgaccgcgacctgtttaagcatctgatcagcgaagccaccaactacgtggcggcggactacatgcgtcacgccaacgagcgccgtgtccatctcgacaaagccctggagtttcgtcgcgagctacatactagccgtcagcaactggcggctgagcagtacaaacacgtcgatatggcgcgtgagctggcagagcacaacggtgccgaaggcgatctggaagcggattatcaggcggccagtgatcacctgaacctggtgcaaaccgcactgcgtcagcaggagaagatcgaacgctacgaagcggatctcgatgagctgcagatccgtctggaagagcaaaatgaagtggtggcagaagccatcgaacgccagcaagagaatgaggctcgtgcggaagctgccgaactggaagtggacgagctgaaaagccagcttgctgactaccagcaggcgctggacgtccagcaaacgcgcgcgatccagtataaccaggcgattgctgcgcttaatcgtgccaaagaactgtgccatctgccggacttaaccgccgactgcgccgccgaatggctggaaaccttccaggcgaaagagctggaagcgactgaaaaaatgctctctcttgagcagaaaatgagcatggcgcaaaccgcgcacagccagtttgagcaggcttatcagctggtggtggcaatcaacggcccactggcgcgtaacgaggcgtgggatgtcgctcgcgaactattgcgcgaaggggtcgatcagcgtcacctggcagagcaggttcagccgctgcggatgcgattaagcgaactggaacagcgtctacgcgagcagcaagaagctgagcgtctgctggcagatttctgcaaacgtcagggcaagaattttgatatcgacgaactggaagccctgcatcaggaactggaagcacgcattgcctctctttccgatagcgtgtctaacgcccgtgaagagcgcatggcactgcgccaggagcaggaacagctgcagtctcgcattcagagtttgatgcagcgtgcgccggtttggctggcagcgcaaaacagtctcaaccagttgagcgaacagtgcggcgaagagtttacctccagccaggacgtcaccgaatatctgcaacagttgctggagcgtgagcgagaggcgattgttgaacgcgatgaagtgggcgcgcgcaaaaacgccgtcgatgaagagatcgaacgtttaagccagcctggcggctctgaagatcagcgtctgaacgcgctggcggagcgttttggtggtgtgctgctgagtgaaatttatgacgacgttagcctggaagatgcgccgtacttcagtgcgctgtatggcccgagtcgccacgccatcgtggtgccagatctgagtcaggtaactgaacacctggaaggcttgaccgattgcccggaagatctctatctgatcgaaggagatccgcagagtttcgatgacagcgtgttcagcgttgatgagctggaaaaagcggtagtggtgaaaatcgccgatcgtcagtggcgttatagtcgtttcccggaagtgccgctgtttggtcgtgctgcgcgtgaaagccgtattgaaagcctccatgccgagcgtgaagtgctttccgaacgcttcgccacgctctcctttgatgtacagaaaactcagcgtctgcatcaggcgttcagccgctttatcggcagtcatctggcggttgcgtttgagtctgacccggaagcagaaatccgtcaactgaacagccgtcgcgtcgaactggagcgggcgttaagtaatcatgaaaatgataaccagcagcagcgtattcagtttgagcaggcgaaagagggcgttacggcgctgaaccgcattctgccgcgtctcaacctgttggctgatgacagcctggcggatcgcgtcgatgaaatccgcgaacgtctggatgaagcccaggaagccgcgcgttttgttcagcagtttggcaatcaactggcgaaactggaaccgattgttagcgtattgcagagcgacccggaacagttcgaacagttaaaagaagattacgcgtactctcagcagatgcagcgcgatgcccgtcagcaggcgtttgccctgacggaagtggtgcagcgtcgtgcgcactttagctattctgacagcgcagaaatgcttagcggtaacagcgatctcaacgaaaaactgcgtgaacgtctggaacaggcggaagcggagcgtacccgcgctcgcgaagcgttgcgcggtcacgcagcgcagttgagtcagtacaaccaggtgctggctagcctgaaaagttcttacgacaccaaaaaagagctactcaacgatctgcaacgtgaattgcaggatatcggcgtgcgtgctgatagcggggcagaagagcgggcgcgtattcgccgtgacgagctgcatgcgcaactgagcaataaccgtagtcgccgcaatcaactggaaaaagcgcttaccttctgcgaagcggagatggacaacctgacccgcaaactgcgcaagctggagcgggattactttgagatgcgcgagcaggtagtgaccgccaaagcgggctggtgtgcggtgatgcgcatggtgaaagataacggcgttgagcgccgcttacaccgtcgtgagctggcttatctctccgctgatgatttgcgttccatgagcgataaggcgttaggtgcgctgcgtctggcggtggcggataacgaacatctgcgcgacgtgctgcgcatgagcgaagatccgaaacgtccggagcgtaaaattcagttcttcgtggcggtttatcagcatctgcgtgaacgtattcgtcaggatattattcgtaccgatgatccggtggaagctatcgaacagatggagattgaacttagccgtctgaccgaagaattaacctcccgtgaacagaaactggcgatcagttcccgcagcgtggcgaacatcattcgcaaaaccattcagcgcgagcagaaccgtatccgtatgctcaaccaggggttgcagaacgtaagctttggtcaggtgaacagcgtgcgtctcaacgtgaacgtgcgtgaaacgcacgccatgctactggatgtgctctctgaacagcacgagcagcatcaggatctgtttaacagcaaccgtttgaccttcagcgaagcgctggcgaaactgtatcaacgtcttaacccgcagattgatatggggcagcgcacgccgcagaccatcggtgaagaactgctggattaccgcaactatctggaaatggaagttgaggttaaccgtggttccgatggctggctgcgcgcagagtctggtgcattgagcaccggtgaggcgattggtaccggtatgagcattctggtgatggtggtacaaagctgggaagatgaatctcgccgcctgcgcggtaaagatatctctccttgccgcctgctgttcctcgatgaagcagcgcgactggatgctcgttctatcgccacgctgtttgaattgtgtgagcgtttgcaaatgcaactcatcatcgcagcgccggaaaatatcagcccggagaaaggcaccacctataaactggtgcgtaaagtcttccagaataccgaacacgttcatgtcgtcggcctgcgaggatttgcgccgcaactccctgaaacgcttccaggaactgacgaagcgccttctcaggcgagttaaaattaaggcggcagcaatgccgccttttctttttccgaaaactccgtttctgcactaaaaaagtggcacattacggcgcgcttttctttaaacttctttacattaggttatgtaaaaacgtatcggcgtttatatactgaagataagcctgatgagtaacaggcttgctcgtcatactttcgtgagtattggcgttgtacaggcaagtcgtaaaataacagcctggctattcagagtatgataaaaacagggggcaagggatgttgcttaatatgatgtgtggtcgtcagctgagcgcaatcagtttgtgcctggccgtaacattcgctccactgttcaatgcgcaggccgatgagcctgaagtaatccctggcgacagcccggtggctgtcagtgaacagggcgaggcactgccgcaggcgcaagccacggcaataatggcggggatccagccattgcctgaaggtgcggcagaaaaagcccgcacgcaaatcgaatctcaattacccgcaggttacaagccggtttatcttaaccagcttcaactgttgtatgccgcacgcgatatgcaacccatgtgggaaaaccgtgatgctgttaaagccttccagcaacagctggcagaggtggcgattgccggtttccagccgcagtttaataaatgggtagagttactgaccgatcctggtgttaacgggatggcacgcgacgtggtgctctctgatgcgatgatgggctatctccatttcattgcaaatattccggtcaaaggcactcgctggctatatagcagtaaaccttatgcacttgcaacgccgccgctcagcgtgattaaccaatggcagctggcgctggataaaggtcaattgcctacgtttgttgcaggactggcaccgcagcatccgcaatatgcggcgatgcatgaaagcttactggccttactctgtgacaccaaaccgtggccccaactgaccggcaaagcaacgttgcgcccagggcagtggagtaacgacgtaccggcgttgcgcgaaatattgcaacgcacaggcatgttggacggggggccgaaaattactctacctggcgatgacacgccaactgacgcggtagtcagcccatccgctgttactgttgaaacagcagaaactaagccgatggataagcaaacgacgtctcgtagtaaacctgcgcctgccgttcgcgccgcctacgataatgaactggtggaagccgttaaacgttttcaggcatggcaaggattgggggcagatggtgctattggcccggcaacacgtgactggttaaacgtaacgcccgcccagcgtgctggtgtgttggctctcaacatccagcgattgcgcttgctgccaacagagctttctaccgggatcatggttaacattccggcctatagcctggtctactatcagaacggcaatcaggtgctggatagccgagtcattgtcggtcgccccgatcgcaaaacgccgatgatgagcagtgcccttaacaacgtagtggtaaacccgccgtggaacgtacctccaactctggcacgcaaagatattctgccaaaagtgcgcaacgatccgggatatctcgaaagccatggctatacggtgatgcgcggctggaacagcagagaagcgattgacccatggcaggttgactggtctacaatcacggccagcaatttaccgttccgcttccagcaggctccaggcccacggaacagcctggggcgctataaattcaatatgccgagtagtgaggccatttatttgcatgacacgccgaaccacaatctgttcaagcgtgatacacgcgcattgagcagtggctgtgtacgagtgaataaagcttccgatctggcgaatatgctgttgcaggatgcaggctggaatgacaaacgtatttctgatgcgctgaagcagggtgatacacgttacgtcaatattcggcagagcattccggtgaatctctactacctgacggcctttgttggtgcagatggtcgtacccagtatcgtacagatatttacaattatgatctgcctgcgcgatccagcagccaaatcgtaagcaaagcggaacaattaatcaggtaaatgaagtagttcggggaaatcagttgtcgtaataattagcatgattgggggcgattctctgcagcccccgtcactgctggggttgagtcatcttgacgtctgctttacgggcggttaaggtgcctcttgtgcgccagaagtgcatataaacgataacattgacctgtagacttgattatcatggacaaattcgacgctaatcgccgcaaattgctggcgcttggtggcgttgcactcggtgccgccatcctgccgacccctgcgtttgcaacactctctaccccacgcccgcgcattttgacactcaataatcttcataccggagagagtatcaaagcggagtttttcgatggcagaggctatattcaggaagaattggcaaaacttaaccattttttccgcgattaccgcgcgaacaaaataaagtccatcgacccaggattattcgaccagttgtatcgcctgcaagggttgttaggcacgcgcaaaccggtgcaactcatttccggttatcgttctattgataccaacaatgaactacgcgcccgcagccgtggagtagcgaagaaaagctatcacactaaaggccaggcgatggatttccatattgaaggtatcgcgttaagcaatattcgcaaagccgcgttatctatgcgcgcaggtggtgtaggatattatccacgtagtaactttgtgcatattgataccgggccagcacggcactggtaataattgcttaacgaaacaggggcagtatgaactatcgtattattccggtcaccgcattctcccagaactgtagtttaatctggtgtgaacaaacccgtctggccgcactggtcgatcctggcggcgatgcggaaaaaatcaaacaggaagttgatgacagcggcctgacactgatgcagatcctgctgacgcatggtcatctggaccacgttggcgcagcggcggaactggcgcaacattacggcgtgccggttttcggcccggaaaaagaagatgagttctggctgcaaggcttgcctgcgcaaagtcgtatgtttggtctggaagagtgccagccgctgacgccagatcgttggctgaacgaaggcgataccatcagcatagggaatgtgactttacaggtgttacattgccctgggcatacgccgggtcatgtcgtgttttttgatgatcgggcaaagctgctgatttctggcgatgttattttcaaaggcggagtagggcgcagtgacttcccgcgtggcgatcataatcaactgatttctagtatcaaagataaattgctgccactgggggatgacgtgatatttattccgggtcacggaccattatccacacttggttatgaacgcctgcataatcccttcctgcaagacgaaatgcccgtctggtaaggcacataaaaaagcccgcttttaatgctggcctggatttctggcaaagtgcgctttgtttatgccggatgcggcacgagcgccttatccggcctacaaaatcgtgcaaattcaaaatattgcaggggacgcgtaggcctgataagcgtagcgcatcaggcaatgttgcgtttgtcatcagtctcagcccgcttttcagcgggcttcattgtttttaatgcttacagcactgccacaatcgcttcgcacagcggagccatgttatctggtgtcatcccggccacatttacgcgaccagaagcaaccgcatatacgccaaactcttcgcgcagacgcagcacttgttcttttgtcaggccactgaaggagaacatgccgttctgtttgatgataaagctgaagtcgcggtttgcgcctttttcctgcagcgtattgacgaacaactgacgcatacgctgaatacgctggcgcatatcagtcagctcttgttcccaaatcgcacgtaacgcatcgttgctcaggatggtggcaacaacagaagcgccgtgtgctggtgggttagagtagttagcgcgaatcgccgctttcatttggctgaatgcgcgatcaacggtttcactgtcggcagcaaccagagtacaagcgccaacacgctcgttgtacaggccaaagtttttagagtaggaactggcaacaatcagctctttatgcatagccgcgaaagcgcgcagtccttcagcatcttcttccagaccacgggcaaaaccctggtaagcgaagtcaaacagcggtaaccagcctttctcaacggagagttgtgccagtgtttgccattgttccagcgtagggtcgataccggttgggttatggcagcagccatggaacagcactacgtcgccagcctgagcttcattcaggctgttaatcagtgcatcgaagtcaagagtgtgattttccgcatcataataagcgtattcacgaacttccagacctgcagagttaaagacgctcttatggttcggccagcttgggttgctcacccacacacgcttaacgctggtattttttgccaggaaatcggcagccacgcgtagtgcgccagtgccccccggagtctgtgccgtgcgagcacgtttgtcattgatcagggcgctacctttaccaaacagcagttcctgagtgcagcgaccaaattcagggatgccgtcaatgccgaggtaatttttggtggtttcattttcgagcagatactgttcagcctttttcacgctggtcagtaccggggttttgcccgtctcatctttatagacaccaatcccgaggttaattttgccgggacgttcatcggcacgaaacagatcggccaggcccagaatcgggtcggcaggagcggcggtaatgttctcaaacatgacgaggttccattatggttacagaagggaagtccgctatcagggtaacgggagatttacaaaattccaactattactgatgaaaacgcaggctgtttttgcaagacgtgagattgctctggaaggtataaaaaaaacaggaccaaagtcctgttttttcggcatttaacaaagaggtgtgctattagaactggtaaacgatacccacagcaacggtgtcgtcactacctacgcccagtttgttgtcagaatcgatctggttgatgatgtagtcaacataggtggacatgtttttgttgaagtagtaggttgcgcccacttcaaagtagttcaccagatcaacatcaccgataccttctacgtctttcgctttagatttggtgtaagcgatggacggacgcagaccgaaatcgaactggtattgcgcaactaacagaacgtcttgcgttttgttggcgaagccgctggtgtttgtaaatttattagtgatcggcgtagcgttacgggtttcaccgtagttcgctgccaggtagatgttgttcgcgtcgtacttcagaccagtagcccactgttcagcttttttaccgttgccaagaggttgagcttcttgcaggttggtacggtcagctgcaccataagcaccaacgataccaaagccttcgtattcgtagctgatagaaccgccaacaccgtcgccgttagaacggcgtgcagtgtcacgctcgtttttacccaggtactgaacagcgaagttcaggccatcaaccagaccaaagaagttggagttacgataggtagcaacgccgccaacacgaccaacgaagaagtcatcgctgtatgcagtatcaccaccaaattctggcagcatatcggtgtaacccagtgcatcataaaccacaccgtagttacggccgtaatcgaaagaaccaacgtcagcgtatttaagacccgcgaatgccagacgcgttttgttaccagtttgagcgtcagcgccttcagagttgttaccctggaagttatattcccactgaccataaccggtcagatcggaattgatttgagtttcccctttaaaaccaagacgggcataggtcatgtcgccattgccaccgtaactgttttcaccgttacccttggaaaaataatgcagaccaacagctttaccgtacagatctactttgttgccatctttgttatagatttctgcagcgtttgcagtacctgctactaacagagcagggacgatcactgccagaatattgcgcttcatcattatttattaccctcatggttttttttatgacacctgccactgccgtcaataagttctgtcaataaaaatttacggaactattgatgagagtttggtgtctttatgtgtctgcaggcatctttccattcaaactaacgtttcgctaccgtgaaagtgctacaaagataaagatttggtttcaaaaagaaaaaatatgtaaccaaaagtaaaatttaaggaactttgtgaacaccgtcatatttccatagagacgtgatgatatttacagcaattttaatctatttatatgatttccttatatttaaattaactaaacggaaattttgtttctgatggaaactttatcgacctggcacaaaatcttctttcagacatccagaatgccaaaaaatagtatgaaaattgtgctattagctaagaaaaaactaatccgcaataagaatgcggattagtttttgcgcgtaaatgttgcaatgtaatattccgtaacaggatgatcgttatggcggggttgcaaatagattgcttgacttaacaaacagataacttgacagaaaagataaaaaaagagccagcgggcgctggctcttgaagacgctaaattagaagctggcgttacgcggagtacgtgggaacggaatcacatcacgtacgttttgcacgccagttacgtaagcaatcagacgttcaaaaccaagaccgaaaccactatgcggaacagtaccgtagcgacgcagatcgcgataccaccagtaatcttctttattcaggcccatttccagcatacgctcgtccagcacgtccagacgttcttcacgctgggagccaccaatgatctcaccgatgcccggagccagaacgtccatagccgcaacggttttaccgtcttcgttaaggcgcatatagaacgctttaatatctttcggatagtttttaaccactaccggtgctttaaagtgttcttccgccagataacgctcatgctcagaagagagatcgactccccagtaaaccgggttttcaaacttcctgccgcagttttcgagaatggtcactgcgtcggtataatccacctgcgcaaaatcggcttcaatgaagcgttccagacgactaacggcatctttatctacgcgttcagcgaagaatttcatgtcgtcagcgcgttcttcgagaaccgctttgaagacatatttcagcatggcttcagccagacccgcaatatcgttcaggttagcaaacgccacttccggctccagcatccagaattccgccaggtgacggctggtgttggagttttcagcacggaaagtcgggccgaaggtataaattttggacaatgcgcaagcgtaggtttcgccgttcaactggccagatacggtcaggaaagactctttaccaaagaagtctttgtcgaaatccactttgccctgatcgttacgcggcaggttttccagatccagcgtagaaacgcggaacatttcgcctgcaccttcggtatcagatgcggtaatcagactcgtactaacccagaagaatccctgctcgttaaagaagcgatgcagcgcctgcgccagcgtatggcgaacgcgcgcgacggcaccaatcaggtttgtgcgcggacgcaggtgagcgacttcacgcagatactcaatgctgtggcgttttgccgccatcgggtaagtgtctggatcttcaacccaaccagcaacttcaaccttgctggcctgaatttcaaattgttgcccctggcccgggctcgccacgactttacccgtcacaatgacgctgcagccggtggtcagacgcaggacgtcttcattgtaattgggcagagaattattgatgacagcctgtacaggatcaaagcaggaaccgtcataaacggcgaggaaggagatgccagctttactatctcggcgggtacgtacccatccgcgcacggtgacttcgctgtcaacggctacacggccctggagtacgtcggctacaggcacaacgctcataatattctctctgttaatagtcggaaaaaataaacacttgtccacccgtaaatggggggatacctatgttacctggcatctgcaatcagacaagcagaattcgcaaatgcagcgaaagatttcggaattaaaggtaaaaaaagggagccgattagctccctgatgatattaactggcttttttaatatgcggaaggtcgaacgctttgcgcagcgcccgaacaaacgctttatcatggcagatagttttgccagggctgtcagaaagtttcgccaccggtttaccgttacactctaccaacttaatgacaatattcaggggttttacctgggggatatcgcaggtcaggcgagtcccaataccaaaacttaattgcacgcgggaagagaagtggcggtatagctcaaccgctttgcgtaaatccagattgtcagagaaaaccagcgttttactctgtggatcaattcccagcttttcataatgtgcaatggctttttcaccccattcaaccgggtcgccagagtcatgacgcaggccctgataccgactagcgaactcgacaccgaaatcacgcaggaaagcatccatagtgatgcagtcggttaatgcaatgccaagttggtcgggatactcttccagccaggcagcaagtgcagctcgctggctgttggctagatccgggctgatttgctgatgtgcctggaaccattcgtgtgcctgtgttcccatcggcgtgagggaaagccgacgcgccagatcgtagttgctggtgcccacaaaccaggattcctgttgcagacgcttaacgatggtttcttgtacttcgcgagaaaaacggcgacgggtgccaaaatccatcagatggaagcggctcatatcaagaccggcggttaacgcgctgaagtcgactaatttgctttccagcgtgtcgagggcttgcgcaacgtcggcctgcggactgcgatagcgatgtaccatttcactgataaccgccagcaaaggaacttcccagaggatgacttcacgccacgggccgcttaaacgaatatccagcttgccattatcgttggacacggtgacttgttccgggttaaagcggaactcgcgtaaccagttaagatagtcggccttaaagaaaggcagggcagaaagccactgatattcatcatcctgcaggcgcaggtgctgcatcgcctgaacctgttcacgaatagcatcggcataaatacccagcagatcgtcacctcggcaacgaaactccgccgcgacatgcacatcgtaatagtgatgaaacacggcttgctgcatatgcaacttataagcatctgtatccagcaagctgtgcagaacaggagaagcgaattgtgtcataggtgcgcagtagcgtcctcgtacaggagcgtttagtacaataaacatcttcaggaactgctggagtataccttgtttcgcaatttattgaaccccgatcacaccatatgccacctttctggtcgatggcattacgcggtgtatgttataaaaatgtagcaataaaggcgtttgtacctgaaaagatgaagattctgcatagcgcgatttacgcaacaggaatagactgaacaccagactctataaaagatgctaaaggttatttatgactcaacagccacaagccaaataccgtcacgattatcgtgcgccggattaccagattactgatattgacttgacctttgacctcgacgcgcaaaagacggtcgttaccgcggtcagccaggctgtccgtcatggtgcaagtgatgctccccttcgtctcaacggcgaagacctcaaactggtttctgttcatattaatgatgagccgtggaccgcctggaaagaagaagagggcgcactggttatcagtaatttgccggagcgttttacgcttaagatcattaatgaaataagcccggcggcgaataccgcgctggaagggctttatcagagtggcgatgcgctttgcacccagtgtgaagccgaaggtttccgccatattacgtattatctcgaccgcccggacgtgctggcgcgttttaccaccaaaattattgccgataaaatcaaatatcccttcctgctttccaatggtaaccgcgttgcgcaaggcgaactggaaaacggacgccattgggtacagtggcaggacccgttcccgaaaccgtgctacctgtttgcgctggtggcaggcgactttgatgtactgcgcgatacctttaccacgcgttctggtcgcgaagtagcactggagctgtacgtcgatcgcggcaaccttgatcgcgcgccgtgggcgatgaccagcctgaaaaactccatgaaatgggatgaagaacgctttggcctggagtatgacctcgacatctatatgatcgtcgcggtggatttcttcaatatgggcgcaatggagaataaggggctgaatatctttaactccaaatatgtgctggcccgcaccgacaccgccaccgacaaagattacctcgatattgaacgcgttatcggccatgaatatttccataactggaccggtaaccgagtgacctgtcgcgactggttccagctcagcctgaaagaaggtttaaccgtcttccgcgatcaggagttcagctctgaccttggttcccgcgcagttaaccgcatcaataatgtacgcaccatgcgcggattgcagtttgcagaagacgccagcccgatggcgcacccgatccgcccggatatggtcattgagatgaacaacttctacaccctgaccgtttacgagaagggcgcggaagtgattcgcatgatccacaccctgcttggcgaagaaaacttccagaaagggatgcagctttatttcgagcgtcatgatggtagtgcagcgacctgtgacgactttgtgcaggcgatggaagatgcgagcaatgtcgatctctcccatttccgccgttggtacagccagtccggtacaccgattgtgaccgtcaaagacgactacaatccggaaaccgagcagtacaccctgaccatcagccagcgcacgccagccacgccggatcaggcagaaaaacagccgctgcatattccgtttgccatcgaactgtatgataacgaaggcaaagtgatcccgttgcagaaaggcggtcatccggtgaattccgtgctgaacgtcactcaggcggaacagacctttgtctttgataatgtctacttccagccggtgcctgcgctgctgtgcgaattctctgcgccagtgaaactggaatataagtggagcgatcagcaactgaccttcctgatgcgtcatgcgcgtaatgatttctcccgctgggatgcggcgcaaagtttgctggcaacctacatcaagctgaacgtcgcgcgtcatcagcaaggtcagccgctgtctctgccggtgcatgtggctgatgctttccgcgcggtactgcttgatgagaagattgatccagcgctggcggcagaaatcctgacgctgccttctgtcaatgaaatggctgaattgttcgatatcatcgacccgattgctattgccgaagtacgcgaagcactcactcgtactctggcgactgaactggcggatgagctactggctatttacaacgcgaattaccagagcgagtaccgtgttgagcatgaagatattgcaaaacgcactctgcgtaatgcctgcctgcgtttcctcgcttttggtgaaacgcatctggctgatgtgctggtgagcaagcagttccacgaagcaaacaatatgactgatgcgctggcggcgctttctgcggcggttgccgcacagctgccttgccgtgacgcgctgatgcaggagtacgacgacaagtggcatcagaacggtctggtgatggataaatggtttatcctgcaagccaccagcccggcggcgaatgtgctggagacggtgcgcggcctgttgcagcatcgcagttttaccatgagcaacccgaaccgtattcgtagcttgattggcgcgtttgcgggcagcaatccggcagcgttccatgccgaagatggcagcggttacctgttcctggtggaaatgcttaccgacctcaacagccgtaacccgcaggtggctagtcgtctgattgaaccgctgattcgcctgaaacgttacgatgccaaacgtcaggagaaaatgcgcgcggcgctggaacagttgaaagggctggaaaatctctctggcgatctgtacgagaagataactaaagcactggcttgataaataaccgaatggcggcaatagcgccgccattcggggaatttacccctgttttctcaggcgagtttcagattcaccacgttgcatcacccgttgcaacacctccgcttccagctccgctaatcgcacgctccctaatcgacgcggacgggggatatccactgtcaaatccagaccaatttttccctcttcaattaacagcacccggtcagccatcgctaccgcttcgctcacatcatgcgtcaccaacagtacggtaaagccgtgctcctgccaaagactcacaatcaaatcctgcatctcgagtcgcgttaaggcgtccagcgccccgagcggttcatcaagcaacaataatcccggtcgatgaatcaacgctcttgccagcgccactcgctgtttctgcccgccagaaagtgcggcaggccattcccctgcgcgattctccagtcctaccgcagccaacgctcgacgtgcggcatcgcgccactggcctttaaggcctaacccaacgttatcaatcacgcttttccacggtagcagacgcgcatcctgaaacatcattcgcgtgtcttcctgaatttcagccagcggtgtggtgcccgctaacacatcgcctgcggttggcgtttccagacctgccagcaggcgcagcagggtacttttgccaccaccgctgcggcccaccaccgccacaaactgacctgccggaatatgtaaatccagttggttcaggacgatattttccgcgtaatgtttgcttactgcattgagcaacaatggcgtgccctggttcagacgagcagtattcataccgtggcctccttcaaatgataagccgggttccagcgcaaccagaggcgctctaacagctgcgcgctgacgtcagccagtttgccgagcagggcgtaaagaataatagcgactaccaccacgtccgtttgcaaaaacccccgcgcattcatcgccagataaccaatgccactattggcagaaatggtttcggcaacaatcagcgtcagccacatcaggcccaacgcaaaacgcacgccgaccataatactgggcagggcaccaggcaggatcacatggataaacagcggtatgccggataatccatagctacgcgccatctccaccaacccgcgatcgatattacggatgccatgccaggtgttgatataaatggggaatagcgtaccgagcgccaccagaaagatttttgcggattcatcaatgccaaaccacaaaatcaccagcgggatcagcgccagatgcggcacgttgcgcaacatctgaatactggtatccagcagccgttctccccagcgagatagcccgctaatcagtcccaaaatcaaccccaggcttccgccaatactaaagccaatcagcgcccgccaggagctgatcgccagatgctgccacagttcgccgctggcggagagcgtccagaacgccgtcaccactccttccggactaggcaaaatacgcgtgctcagccagccaacgctggaggccagttgccacaccgccacgatgcccaccggtaaaaaccagggggcaacgcgcaataaccacttcttcactggcgttgccattatttcttccttagctttgcgcgactttacgggggataaaatcattcgccaccgcttcgccttgcggattcagcggctgcggctggggaatttccgggatggcgacatccagaagcgggaacagcaactcgccaacccgatacgcttcttccagatgcggatagccgctaagcacaaaactgtcgatgccaagcgcggcatattcgttgattcgcgcagcgaccgtaggaccatcgcccaccagcgccgtcccggcaccgccgcgcactaagccaacgcccgcccataaattggggctgatctccagattgtcgcgcttgccgttatgtaacgccgccattcgctgttgccctacggaatccgtccgggcgaatgcggcctgtgctttggcgatagtttcatcatcaagatggctgattaaccgctcggcggcctgccacgcttcgtcgttagtttcacgaacaatcacatgcagacgaataccgaaacgaattttgcgtccatgcgcggcagctttcgcccgcacttgttcgattttctctttaaccagttccggcggttcgccccaggtgaggtagagatcaacctgttctgccgccagctcctgggcgacatcactgcttccgccaaagtaaagtggcggatacggctgttgaatcgccgggaagagcagttttgctccgcgcacatgaatatgtttaccgttgaaatcgacggtttctctctgcaataaacgccgccagacctgggtaaattccgcgctggcttcgtagcgctcgctatgatcaaggaacactccgtcgcctgccagctcttgtggatcgctgcctgtgaccaggttaaacaacgcacgtccattactgagacggtcaagcgtggcggcctggcgggcggcaacggtaggactggttacgctgggacgcagggcgacaagaaacttcagccgctgcgtcaccgggatcatgcttgcggcaaccagccacgcatcttcgcaggagcgccccgttggaattagcacaccggtatagccaagacgatccgccgcttgcgcaatttgttgcagataaccgtgatcaaccgggcgactaccttcttccgttcccagataatgcccgtcaccgtgggtcggtaaaaaccagaacatattcagactcataattgttttccttccagttgagtgggctgccagatgcgctggcgaatatcgacttttttcggcaccagacgattttcataaaacagatctgccgtttgctgctgtaaggcggcaacctcggcgttaaccggtttgatggtggtaggagggcgatgatctaagtaagaggcaatcaccggtgccggtaagcccatcgtttttgccagtaaagcgatgctttgctcgcgctggctgcgggttaacgcatcggcctcactaaaggttgccagtacgccctgaataaaagcgccgtttttttctgcatagggacgagctgccagataaaagcttccagtttgattgagatcggtgccgtctttcagcacccgcacgccgccctgtaataatgcagcagagtagtagggatcccagatagcccaggcgtcaacgttaccttgctggaacgcggcgcgggcatcagcgggcgtcaggtaagtgggttggatatcggtaaacttaagtccggcctgacgcagtgcacgcagtaaaaggttgtgactactggaacctttctgaaaggcaactttgtgacctttaagatcggctacggttttgatcgggctgttttctgccaccagaatcacttcggctttgggcttcggtggctcgacgcccacgtacaccaaatcagccccggcagcctgggcaaagattggcggaatatccccggtactgccgagatcaatactgccaacgtttaacgcttccaacatttgcggacccgcggggaactccacccaggagattttactttccggatagcgtttttccagtaactggtggctttttgccagcaccataccaatactgcctttctgatagcctatacgtaacgcttcagggctggattctgcagcaaccgcaaaagtagagacgctaagcaatcccgccagcgccagtttaatgatgttacgcatgggcattacctcgcagagacagaaggtcaggaacctgaacatcgcggcggtgcaatgcctgccagaaagtttctagcgcggtatcaagacgggtttgcagatttggcgtgaactggggtctgtgatggtaatcaattacttgactgtcatcggcaaacacgccgtgcaggatctcctgagctttcagtgcgcttaaaactggtttaagggcataatcgaccgccagcagatgggccacggtaccgcccgtcgccagcggtagcaccactttgccttgcaaagcgcgttctggcagcaggtcgagcagggttttcaacgcaccggaataggcggctttatacacaggcgtggcgacaatcagcccatcggcctgttgcagctgttcggtgaaggtcttgagtgccggactatcgaaacgagcataaagtagatcttccggggcgaagttttgcagattccagtgataaacctctacatccaggccatttagtttttcccgcgcatattccagcaaggagctggagcgagaaggaaagcgaggactacccgccagggtgatgacacgcatactctctccttataaccaattgttctttttttgttaacattgataacaattcggtcagtctgtcggagagacaagaaaattccaaatataaattttgtgtatctttttctgaaaataaactaaagaaagggctttatatatcacgcatatttatttattggatagtcattagatgttgaatcaatgaattactcgttcagttaatatttaaatattcatgaaatctataaattaaagatttgtcacttattggatttagtatgcttgatttaaatggcggacaattattgttattattaagtctaatgtcatttaaaggcattatcatatttacgaagagatcaggatgataacgatgaaaaaaagtgtattgacggcgtttataactgtggtatgtgcaacgtccagcgttatggctgctgatgataatgctatcacggatggcagtgtaacatttaatggtaaagttattgctccagcttgtaccctggtagctgcgacgaaagattccgtggtgactttgccagatgttagtgccacgaagttgcaaaccaatggtcaggtttctggcgtgcaaattgatgtgccaattgaattaaaagattgtgatactaccgtaacaaaaaatgcaacgttcacctttaatggcactgcggatactactcagattacagcgtttgctaaccaggccagttctgatgctgctacaaacgtggccctgcaaatgtatatgaatgatggtacaacggccatcacgccagacacagaaaccgggaacattttgttgcaggatggagatcagacgttgacttttaaagttgattatatcgctacggggaaagcgactagtggtaatgtgaatgcggtaacaaatttccatattaactattattaatagaactcattaattgttttattaattagtacccctccagtgttctggaggggatattcatattttttaagagtgactatttatgaaaacttgcataacaaagggaattgtgaccgtaagtttaacggcaatattactcagctgcagttccgcatgggcggcaggtaaaggcgggattggacttgcagcaacacgtcttgtttatagtgaaggtgaagagcaaattagtctgggtgtacgtaacaccagtccggatgttccttatcttattcagagttgggtgatgaccccagataataaaaaaagtgcagactttattattacaccaccgctatttgtgctgaatccggcaaatgagaatctgttacgcattatgtacattggagcgccgttggcgaaagacagagaaacccttttcttcactagcgtacgggcagtccctagtacaacgaagcggaaagagggaaataccctgaagattgccacacaaagcgtcatcaaacttttctggcgaccaaaaggtttagcgtatcccttaggcgaggctccggcgaaactgcgttgcactagcagtgctgacatggttacggtcagtaacccaacaccttatttcattaccctgacagacctgaaaataggtggaaaagtagttaaaaatcaaatgatttccccctttgataaataccaattttctctgccaaagggggccaaaaatagcagcgtaacgtatcgaaccatcaatgactacggggcggaaacgccgcaactcaactgtaaaagctaagccgtcttcagttaagagagcgagatgtatagaactcatcgacaacacagcctgttaagctctggtggagtgccaagctttattggtgggctggtggtgtttgtgagcgcagcgttcaatgcacaagctgaaacctggttcgatcctgcttttttcaaagatgatcccagtatggtggccgatttgtctcgtttcgaaaaaggacaaaaaataacgccaggggtttatcgtgtcgatattgttctgaatcagacaattgtagatacgcgcaacgtcaattttgttgagataacgccagagaaggggattgccgcctgtttgacgactgaaagcctggatgcaatgggtgttaatactgatgcgtttccggcttttaaacaactggacaaacaagcgtgtgtgccattggcggagattattccggatgccagcgtaacgtttaatgtgaataaactccgtctggaaattagtgtaccgcaaatcgccatcaaaagtaatgcccgtggttatgtcccccctgaacgttgggatgaagggatcaacgcgctattactgggatatagctttagcggggctaacagtattcatagcagcgcagacagtgattctggcgacagctattttctgaatttaaacagtggcgttaatttaggcccatggagattgcgcaacaatagtacatggagtcgtagtagtggccaaaccgcagaatggaagaatctcagcagctatttgcaacgggcggttattcctctgaaaggcgaactgaccgtaggtgatgattatactgcaggcgattttttcgatagtgtcagctttcgtggtgtgcagctggcgagtgatgacaacatgctgccagacagcctgaaagggtttgcgcctgtggtgcgtggtatcgccaaaagcaatgcccagataacgattaagcaaaatggttacaccatttaccaaacttatgtaagccctggtgcttttgaaattagtgatctctattccacgagcagcagcggtgatttgttagttgaaatcaaagaagcggacggcagcgtcaatagctacagcgtaccgttctccagtgtgccattactccagcgtcaggggcgaatcaaatacgcggtgacactggcgaaatacagaaccaatagtaatgaacagcaggagagcaaatttgcccaggccacgttgcagtggggcggaccgtggggaacgacctggtatggtggtggacaatatgctgaatattaccgtgccgccatgtttggtctgggatttaacctcggcgatttcggagcaattagcttcgatgcgacccaggcgaagagtacgctagcagatcaaagcgaacataaaggtcagagttatcgttttctgtatgccaaaacgctcaaccacttgggcactaactttcaattgatgggctatcgctatagcacgagcggtttctacaccctttccgacaccatgtataaacatatggatggctacgaatttaatgacggtgatgatgaagatacgccgatgtggagccgttattacaatttgttttacaccaaacgtggcaaactgcaggtcaatatctcccagcaattaggcgagtacggtagcttttatttaagtggtagccagcaaacttactggcatacggatcaacaggatcggctattacagtttggctacaacacgcaaattaaagatcttagcctggggatttcctggaactacagtaagtcccgtggtcaacctgatgctgatcaggtgtttgctctaaatttttccctgccgctcaatctgttgctccccagaagtaatgatagctataccaggaaaaaaaattacgcctggatgacctctaacaccagtatcgataacgaagggcacactacacaaaacctgggtttaacggagacattactcgatgacggtaacctgagctacagcgtgcaacagggatataacagcgaggggaaaacggctaatggtagcgccagcatggattacaaaggggcgtttgcggatgcccgagtgggctacaactacagcgataacggcagtcaacaacaactgaactacgctcttagtggcagtttagttgcccatagtcagggcattaccctggggcaaagcctgggggaaactaacgttctgattgcagcaccaggcgcagagaatactcgtgtggcgaacagcaccgggctgaaaactgactggcgcggatataccgttgttccttatgccacttcttatcgggaaaatcgaatcgcacttgatgcggcgagcttaaaacgtaacgtggatcttgaaaatgcagtagtcaacgtggttcccaccaaaggggcgttggttctggcggagttcaatgcccatgcgggtgcaagggtattaatgaaaacaagtaagcagggtataccgctgcgttttggcgcgatagcgacgctggacggcgtacaggctaatagcggcataattgatgatgatggcagcctctatatggcgggtttaccggcgaagggaacaataagcgtgcgctggggcgaagctcccgatcaaatttgtcatatcaattacgagcttaccgaacaacaaattaactctgcgattacgcgaatggatgccatatgcagataatctttggagaaaaatgcgtgagtttactacgactattttttgccgccgtcttaatgttatggtgcgctcaaaccgctgcttatagcgggcagtgtcatactactcaggggaatccgtatattggcgtcaattttggcgttaaaaccctggaggaagaagcaaatacggcaggggtagttaaagacaaattttatcagtggaacgaaagcaatgattattatgtttcctgtgattgcgataaagacaatgtcagaagtggccgatgggcattcgccgcggatagtccgttagtctatttaggcgacaactggtacaaaattaatgactatcttgccgccaaagttttattgcaggttaaaggcagttctcctactgcggttcctttcgaaaacgtgggcacagggggggatacccgatggcatatttgcgaccctggcggtcaacgtttaggtgggcagggggcaagcggtaatagcggtagcttttccctgaaaatattgcagccgttcgttggcagcgtcgtcattcctcctatggcgctggcgcgattatatgaatgctacaacatacccgcaggtgattcctgcacgactacaggtacaccggttttagtgtattacctgtctggtacgatcaatagtcttggcagttgttccgtcaatgccggagagacaattgaagttgatttaggtgatgtcttcgctgccaatttccgtgttgtagggcataaacctcttggggccagaacggcagaacttgcaattccagtcaggtgtaacacgggaaacgcgggattagttaatgtcaacctgagtctgacggcaaccacagaccccagctatccccaggcgattaagacgagtcgtcctggcgtgggcgtggtggtgaccgatagccagaacaacattatttcccctgctggtggaacattaccgctctctattcctgatgatgcagacagtatcgcgcgaatgaatgtctatccagtcagcacgacaggtgtaccaccagaaaccgggcgatttgaagccacggcaacggtgagaataaattttgattaacgcgtgaacgtatgaagaaaaaaacgatatttcagtgcgttatcttgttctttagcattcttaacatccatgtcgggatggctgggcctgaacaagttagtatgcatatttatgggaatgtggtcgatcagggctgtgatgtcgccaccaaaagtgcattacaaaatattcatattggtgattttaatatcagtgattttcaggccgcgaataccgtaagcactgctgctgatttgaatatcgatatcaccggttgtgccgctggtattactggcgcggacgtcctttttagcggcgaggctgacacccttgcgccgacactgctcaaactaactgacacaggcggaagcggtggtatggcaacggggattgccgtgcaaattcttgatgcgcaaagtcagcaagaaatcccgctcaatcaggtccagcctcttacgcccttaaaagccggggataacacactcaaatatcaacttcgttataagtccacaaaggcgggagcaacgggcggtaatgcgacggcggttctctattttgatctggtttaccagtgaaggagtgatgttgaaacggataatctggattctgttcttattgggattaacgtggggctgtgagctatttgcccatgatggcacggtcaacattagcggaagctttcgccgtaatacatgcgtgctggcacaggatagcaagcaaatcaatgtgcagttaggcgatgtcagcctgacacgtttttctcatgggaattatggcccggagaaatctttcatcattaatttgcaggattgcggaacagatgtcagcacggttgacgtcacctttagtggaacccccgacggagtgcagagcgaaatgttgtccattgaaagtggtacggatgcagccagcgggctggcaattgcgattctggatgatgcgaagatattgattccgcttaaccaggcgagtaaagactacagcctacatagcggtaaggtgccattaactttttatgcgcaattgcgacctgtcaatagcgatgtgcagagcggtaaagtgaatgccagcgcgacatttgtacttcattatgactaatacgtggaacagattggcgctcttgattttcgccgttttaagcctgctggtggcgggtgaattgcaggcaggagtggtggtcggcggaacgcgatttatctttccggcagacagagaaagcatatctattttactgactaataccagtcaggaatcctggcttattaacagtaaaatcaaccgcccaacgcgttgggccgggggggaagcgagcacagtgccagcaccattactggccgctccgccacttattctcctgaagcccggtacgacaggcacgttgcgcttgctgagaacggaaagcgacatcttgcctgtggatcgcgaaacgctatttgagttaagcattgccagcgtgccatccggcaaagttgaaaatcagagcgtaaaagtggcgatgcgcagcgtatttaaactgttctggcgacccgaaggtttgccgggcgacccgctggaagcttatcaacaattacgctggacacggaatagccagggtgtacaactcactaacccaacgccttattacattaacctgattcaggtgagtgtaaatggtaaagcgttaagtaatgtgggagttgtgccgcctaaaagccagcgtcagacaagctggtgtcaggcaatcgcaccgtgtcatgtcgcctggcgggcgataaatgattacggcgggttgagtgcaaagaaggagcaaaatctgccctgaaacaggttcggaaaacgtttgcgttttttttgccgcaggtcaattcccttttggtccgaactcgcacataatacgcccccggtttgcacaccgggaatccaggagagttcatgtactaccccttcgttcgtaaagcccttttccagctcgatccagagcgcgctcatgagtttacttttcagcaattacgccgtattacaggaacgccgtttgaagcactggtgcggcagaaagtgcctgcgaaacctgttaactgcatgggcctgacgtttaaaaatccgcttggtctggcagccggtcttgataaagacggggagtgcattgacgcgttaggcgcgatgggatttggaagcatcgagatcggtaccgtcacgccacgtccacagccaggtaatgacaagccgcgtctctttcgtctggtagatgccgaaggtttgatcaaccgtatgggctttaataatcttggcgttgataacctcgtagagaacgtaaaaaaggcccattatgacggcgtcctgggtattaacatcggcaaaaataaagatacgccagtggagcagggcaaagatgactatctgatttgtatggaaaaaatctatgcctatgcgggatatatcgccatcaatattagtagcccgaataccccaggattacgcacgctgcaatatggtgaagcgctggatgatctcttaaccgcgattaaaaataagcaaaatgatttgcaagcgatgcaccataaatatgtgccgatcgcagtgaagatcgcgccggatctttctgaagaagaattgatccaggttgccgatagtttagttcgccataatattgatggcgttattgcaaccaataccacactcgatcgttctcttgttcagggaatgaaaaattgcgatcaaaccggtggcttaagtggtcgtccgcttcagttaaaaagcaccgaaattattcgccgcttgagtctggaattaaacggtcgcttaccgatcatcggtgttggcggcatcgacagcgttatcgctgcgcgtgaaaagattgctgcgggtgccagtctggtgcaaatttattctggttttatttttaaaggtccgccgctgattaaagaaatcgttacccatatctaattatttcttcgaattcctctttataagataatcagggctttattttcagccctggttgttttatattcatcgctgttgcttatttagacattttgtacttttattgttgaggttattaagcgaagcgacaatggattgtgttgctgcggttttatagggtaggggagaggcagatgcgaattaaaccagacgataactggcgttggtattacgatgaagagcacgatcgaatgatgctcgatttagccaatggtatgctatttcgcagtcgttttgcgcgcaagatgttgactccagatgccttttctcccgcaggcttttgcgttgacgacgccgcgctctatttctcttttgaagaaaagtgccgcgattttaatttatctaaagaacaaaaagccgaactggtgctgaatgcactggtagcaattcgctatctcaaaccgcaaatgccgaaaagctggcattttgtttcccatggtgaaatgtgggtgcccatgccgggcgatgcggcctgcgtttggttgagcgatactcacgagcaggtcaatttgctggtcgttgaatctggcgaaaatgccgcactatgcctgctggcacaaccctgcgttgttattgcgggtcgcgcgatgcagttgggcgacgccattaaaatcatgaacgacaggctgaaaccgcaggttaatgttgacagcttcagcctcgaacaggcagtttaacgcgccaacttaagtgcagtcttcggtacacagctacagcaaagaatggtgccatcatcgcccattgcactttttttcagcggcgtgacttcgccttctaaaagctgaacacggcaacttccacaaatgcccgcgcggcaagaataagggatacgaattccctgattttctaattgctccagcaacacctgttggttatttccacgaaatgcctgtccctgccagtcaatatctacatttgcgtccggttgttgcgtgatgttggcggtatcatcagcggcagctgcgccgtaaatttttgccggagccgttgccagaatttccacctcatcgccaacgcgaatcacgccgctattacgggcaattaaattctgaccaaaatcgacatcgccgttatcctgggcagtgcggaaagattgcaatgtttttaatggttcgcctgccggatgtttttgccctttttctgggctgacggtggtgaaaatacagcggctacaaggtttaaccacatcaaacaccacatcaccaatgcgaatcactttccagcgatcttcttcccaggcactcgcgccggaaaccaccagattggggcggaattgctccatttttacactggccggacaacgttgttggagatcacgtaagctggcttcgttagcaagaaggtaaggatagccatcagcaaaactcagaggtacagtgttgtggcgtttcacgcgccgggtcatttgtggccccacccagcgtaattgcacttcgcgggagaaaaatccacttagccatttgttgatcgcgtctggcgcaattcgcgcggtaaaatgtgtgccccaaacttcggttggtgcgtcttgtgtggcgaaatcagcaaaacgaacatatgcgctactgccatctggtgcggtgagatgcaagccatcatgcacaggactaggagtaaaccgtaccatctggggaaactggcgagcggtaataaacgtaccgtcaggttccgtgatcataaagatgcgatcgaaggccagaccactgacatctgccagagcatgtgtaagaccaatgccgcgcatgcttttaacaggatgaataaaaagccggattaatgtcgccacggtgcggtcctcaaatgaaaataagccctcaactttatgacatgacgcgcttattagctataatgcgcaacaattttcttagcgcctgtcccattaggctattttatttgtcagtttggccctgggttatgctcgaaatcctcacgtacttgtgtacgctccggtttctccgcgctgtccatgtccagactgactgcaacaattacgcctactgcggtaggctcttagagtaaaagtgacgatatgaattctctgtttgccagtacggcccgtgggctggaagagctgttaaaaactgaactggaaaacctgggggccgttgaatgccaggtggttcagggtggggtccatttcaagggcgacacacggcttgtttaccagagcctgatgtggagccgcctggccagccgtattatgttgccgctgggcgagtgtaaggtttacagcgatttagacctctatctcggtgttcaggcgatcaactggacagagatgtttaatcctggcgcgaccttcgctgtccacttcagtggtttgaatgacaccatccgcaacagtcagtacggcgcgatgaaagtgaaagacgcgatcgtcgatgctttcacgcggaaaaatctgccgcgtccaaatgttgatcgcgatgcgccggatatccgcgttaacgtctggctgcataaagaaaccgccagtatcgctcttgatctgagtggtgatggtttacatctgcgtggctatcgcgatcgtgctggtattgcgccgatcaaagaaaccctggcagccgctattgtgatgcgatccggctggcagccaggaacaccgctgctcgatccgatgtgtggttccggtacgttgctgattgaagcagcgatgctggcgaccgatcgcgcaccaggcttgcaccgtgggcgttggggctttagcggctgggcgcagcatgatgaagctatctggcaggaagtgaaagcggaagcgcaaactcgcgcccgtaaaggcctggctgagtatagctctcatttttacggtagcgacagcgacgcacgggtgattcaacgtgcacgcactaacgcccgtcttgcggggattggtgaactgatcacctttgaggtgaaagatgtcgcgcaactgaccaatccgctgccgaaagggccgtacggcacagtgttgagcaacccgccatacggggaacgtctggacagcgaaccggcgctgattgcgctgcatagcctgctgggtcggatcatgaaaaaccagtttggtggctggaatctctctttgtttagtgccagcccggatctgctaagctgcttgcagctgcgtgcagacaaacagtacaaggcgaaaaacggcccgctggactgcgtacagaaaaattaccacgttgccgaaagcactccagacagcaaaccggcgatggtagcggaagactacaccaaccgcctgcgtaagaacctcaaaaaattcgagaagtgggctcgccaggaagggattgaatgttaccgcctgtatgacgccgatctgccagaatataacgttgccgttgaccgttatgccgactgggtggtggtgcaggagtatgcgccgccaaaaactattgatgctcacaaagcgcgtcagcgtctgttcgatattatcgctgcaaccattagcgtactggggattgcgccaaacaaactggtgctgaaaacccgtgaacgccagaagggcaaaaaccaataccagaaactgggcgagaagggcgagtttcttgaagttaccgaatataacgctcacttgtgggtgaacctgacggattatctcgatactggtctgttcctcgatcaccgcatcgcccgtcgtatgctcggtcagatgagcaaaggcaaagatttcctcaacctgttctcttataccggcagcgccaccgtgcatgcgggattaggcggtgcacgcagcaccaccaccgtggatatgagccgtacttatctggaatgggcagaacgcaacctgcgtctgaatggcctgaccgggcgtgcgcatcgcctgattcaggccgattgcctggcgtggctgcgtgaggcaaatgaacagttcgatctgatctttatcgatccgccaaccttctctaacagtaaacgaatggaagatgcgtttgatgttcagcgcgatcatctggcgctgatgaaagatttgaaacgtctgctgcgtgcaggtgggacgatcatgttcagcaacaacaaacgtggcttccgtatggatctcgacggcctggcaaaactgggactgaaagcacaagaaattacgcaaaaaacgctctcccaggatttcgcccgtaaccgccagatccacaactgctggctgattaccgcagcctgaaaggaatagtaatgagtttaatcagtatgcatggcgcatggctgagcttcagcgacgcgccgcttctcgataacgcagaactgcatatcgaagataacgaacgtgtttgtctggtgggccgcaacggcgcaggcaaaagcacgttaatgaaaatcctcaaccgtgaacaagggctggatgacggtcgcattatttacgagcaagatttgattgtagcgcgtctgcaacaggatccgccgcgtaacgttgagggtagcgtttatgatttcgttgccgaaggcattgaagaacaagcggaatatctgaaacgctatcacgatattagccgcctggtgatgaacgacccgagcgagaaaaatctcaacgaactggcgaaggttcaggaacagctggatcaccacaacctgtggcagctggaaaaccgcatcaacgaagtgctggcgcaactggggttagatcctaacgttgcgctgagcagcctttccggcggctggttgcgtaaagcggcattaggacgcgcgctggtgagtaatccgcgcgtgctgttgcttgatgaaccgacaaaccacctggatattgaaaccatcgactggctggaagggtttttgaaaactttcaacgggacgattattttcatctcccacgaccgtagctttatccgcaatatggcgacgcgcattgttgatctcgatcgcggcaagctggtgacctatccagggaattacgaccagtacctgctggaaaaagaagaagccctgcgcgtggaagaattacaaaatgccgagttcgatcgcaaactggcgcaggaagaggtgtggatccgccaggggatcaaagcacgccgtacccgtaatgaaggccgcgtacgcgccctgaaagcgatgcgtcgcgaacgtggtgaacgtcgcgaagtgatgggtaccgcaaagatgcaggtggaagaggccagccgctccggtaaaatcgttttcgaaatggaagacgtttgctaccaggttaacggtaagcaactggtgaaagatttttctgcccaggttctacgtggcgacaaaattgccctgattggtccgaatgggtgcggcaaaaccacgctgctaaaactgatgctcggtcagcttcaagcggacagcgggcgtattcacgttggcaccaaactggaagtggcttatttcgatcagcaccgcgcggaactggatcccgataaaacggtgatggataaccttgccgaaggtaagcaagaggtgatggttaacggcaagccacgccacgtattgggctatttgcaggactttctgttccatccgaaacgggcgatgacgccggtacgtgcgctttctggcggtgagcggaaccgcttgctgctggcgcgtttgttcctcaaaccaagcaacttattgattcttgacgaaccgaccaacgatcttgatgtcgaaacgctggaactgctggaagaactgatcgacagctatcagggcacggtattgctggttagccacgatcgtcagtttgtcgataacaccgttacagaatgttggatcttcgaaggcggcggtaaaattggtcgttatgtcggcggttatcatgatgcccgtggtcagcaagagcagtatgtggcgctcaaacagcctgcggtgaaaaaaaccgaagaagccgccgcggcaaaagcagaaactgtaaaacgcagcagtagcaaactaagctataaattgcagcgcgaactggagcagctaccgcaattgctcgaagatctggaggcgaagctggaagccctacagacgcaagtggcggatgcttccttcttcagtcagccgcatgagcagacgcaaaaagtgcttgctgatatggctgctgcagagcaggagctggagcaagcctttgaacgctgggagtatcttgaagcgttaaaaaatggtggctgatcgcaaaatagtcgatttaaacagagacagctgacaacggtaaaattgcctgatgaactgggtttatcaggcatgaaaaccaacactttgttagtcatctgtaaaatagcgcatcattaaggagtaccaatgtgcgaacatcatcatgccgcgaagcacatcctgtgcagccagtgtgacatgctggtggcgttaccgcgccttgagcatggtcagaaagcggcatgtccccggtgtggcacaacgttaaccgtggcgtgggatgcccctcggcagcgtcccaccgcctatgcgttggctgcactgttcatgctgttgctgtccaacttgtttccttttgtgaatatgaacgttgcaggagttaccagtgaaattacattactggaaattcccggcgtgcttttttctgaggactacgccagcctcggcacctttttcctgttgtttgtgcaactggttcccgcgttttgtctgataaccattctgttactggtgaatcgcgcggaattaccggtccgtttaaaagagcaactggcacgggtgctttttcaactcaaaacctggggaatggcggagattttcctcgcgggtgtgctggtcagtttcgttaaactgatggcttacggcagcattggggtaggcagcagctttctcccctggtgtttattttgtgtcctgcaactgcgcgcttttcagtgcgttgatcgtcgctggttatgggacgacatcgccccgatgccagaactgcgccagccgctaaaaccaggcgtcacggggatacgtcaggggctgcgtagctgctcctgttgtacggcaatccttcctgctgatgaacccgtgtgcccgcgttgtagtaccaaagggtacgttcggcgtagaaacagcctgcagtggacactcgcgctgcttgtaacgtccatcatgctgtatcttccggctaatattttgcccatcatggtgacggatttattaggcagcaagatgccgagcacgattctcgctggggtcattctgttatggagcgaaggctcttatcccgtcgctgcggtgatctttctggccagtattatggtgccaacgttaaagatgatcgccatcgcgtggctgtgttgggatgccaaagggcatggcaagcgcgacagtgaaagaatgcatttgatttatgaagttgttgagtttgtaggccgctggagcatgattgacgttttcgttatcgcggtgctcagcgcgctggtgcgtatgggaggtttaatgagtatttatccggcaatgggtgcattaatgtttgctttagtcgtcataatgacaatgttttctgctatgacgtttgacccgcgtttgagctgggatcgtcaacctgaaagtgagcatgaggagtcctgacagtatggaatctaataatggggaagccaaaatccagaaagtgaagaactggtctcccgtgtggatatttcctatcgtcacggcgctcattggggcctgggttcttttttatcattacagccatcagggaccggaagtgaccctgatcaccgcgaatgcggaaggaattgaaggtggcaaaaccaccattaaaagccgtagcgttgacgtcggcgtggttgaaagcgccacactggctgatgatttgacgcacgttgaaatcaaagcgcggctgaattccggtatggaaaaattgctgcataaagacaccgtcttttgggtggtgaaaccgcagattggtcgcgaagggattagcggcctgggaacgctgctgtctggagtttatatcgaactgcagccaggcgcgaaaggcagcaaaatggataaatacgatttgctggacagcccaccgttggccccgcctgatgcgaaaggtatccgtgtgattctcgatagcaaaaaagccgggcagctcagcccaggagatccggtgctgttccgtggctatcgggtaggtagcgttgaaaccagcaccttcgatacacaaaaacgcaatatcagctatcaactgttcatcaatgcaccttatgaccgactggtgaccaacaatgttcgcttctggaaagatagtggcattgcggttgatctgacgagtgcagggatgcgtgtggagatgggcagtttgacaacgctgctgagtggcggtgtcagctttgatgtgccggaaggtctggatttagggcagccagtggcaccgaaaacagctttcgttttgtatgatgatcagaagagcattcaggatagcttgtacaccgatcacattgattatctgatgttctttaaagatagcgtacgcggtctgcaaccgggagctccggtagagttccggggtattcgcctgggtaccgtaagcaaagtgccattctttgcgccgaatatgcgtcagacatttaacgatgattaccgtattccggtactgattcgtatcgagccagagcggctgaaaatgcagcttggcgaaaatgcggatgttgttgagcaccttggcgaattgttgaaacgtggtttacgcggaagcctgaaaaccggaaacctggtcactggtgcactgtatgttgatctcgatttctatccaaatacgcctgcaataaccggtattcgtgaatttaatggttatcagattatcccgaccgttagcggcggcctggcgcaaatccagcaacgactgatggaagcgttggataagatcaacaaactgccattgaatccgatgattgaacaggcaaccagtacgctttctgaaagtcagcgcacaatgaaaaacctgcaaacgacgctggatagcatgaacaagatcctcgctagccagagcatgcagcagttgccgacggatatgcagagtacgttgcgtgaattgaatcgcagcatgcagggcttccagcctggctccgcagcctacaacaagatggtggcggatatgcagcgccttgatcaggtgttgcgagaactgcaaccggtgctgaaaacgctcaatgagaagagtaacgcgctggtatttgaagcgaaggacaaaaaagatccagagccgaagagggcgaaacaatgaaaaagtggctagtgacgattgcagcactgtggctggccggatgcagctccggcgaaattaataaaaactattaccagttacctgtggtgcagagcggtacacaaagtaccgccagccagggcaatcgtctgttatgggtagagcaggtcactgttcctgactatctggcggggaatggtgtggtttatcaaaccagtgatgtgaagtatgtgattgccaacaacaacttgtgggccagcccgttggatcaacagttgcgcaacaccctggttgccaacctgagtacgcaactgcccggctgggtggttgcctcccagcctctgggaagcgcccaggacacgctcaatgttaccgtaacggagtttaacggtcgctatgatggcaaggtcattgtcagtggtgagtggctgttgaaccaccagggacaactgatcaaacgtccgttccgtctggaaggagtgcaaactcaggatggttacgatgagatggttaaagtgctggccggtgtctggagtcaggaagccgcttctattgcacaagagataaagcgtctaccttaattataaagatttgtaaatataaccgtctccggtatgttgcctgaggcggtttttttgtctctaacgtgcggaaaaatttgttcctcttcacattttttgtacaaccgacatgcccgtgtagctcacaaatatgacagtggcgtgaattttgcgcattgacggcagttatgattcgcggtattgcttaactgtgattgcacatttagtaatcactgttttcttttccaccagaaaccagtatgagggaaacgaggcatgaagagacaaaaacgagatcgcctggaacgggcacatcaacgtggttatcaggccggcatcgccggacgcagtaaagaaatgtgtccctatcagacgctgaatcaaaggagtcaatggctgggaggctggcgagaagccatggcggacagggtagtaatggcctgattctgtctctttaaaaagaaacctccgcattgcggaggtttcgccttttgatactctgtctgattataatcagaaggcagacgtatcctggaacagaccgactttcaggtcgctggcggtatagatcagacgaccatcaaccagcacttcgccatccgccaggcccataatcagacgacggttaacaatgcgtttaaagtgaatacggtaggtcacttttttcgctgtcggcagtacctgaccagtgaatttcacttcgccaacgcccagcgcgcggcctttaccttcgccgcccagccagccgaggtagaaccctaccagctgccacattgcgtccaggcccaggcatcccggcataaccggatcgccaataaagtggcatccgaagaaccacagatccggattgatatccagttctgcttcaacataccctttgtcgaagttaccacccgtttcggtcattttgaccacacggtccatcatcagcatgttcggtgctggcaattgcgggcctttagcgccaaacagttcaccgcgaccagaggcaagaaggtcttcttttgtataggattcgcgtttatctaccatgttctctgtaagccttattttattgaagcacgcaggatagctaacacgtgtacgctgaacaagtccgatcagttcggaataaaccagttcagccaacgtaatggccatggaaaacggtgacgtccttcctgttggcttgcttgcgcgatacgttcctggatggtttgcatcagcgtcgtttggccttcgccatcccacaccagatttaataataacggcagtgcgtcagtcacatcgtctactgcccagatggtgaatttgccttcttctaccgctttcaccagttcactgtgaagacttaaatggcgaacgttagctgtggggataatgacaccttgtttcccggttaactcacgttgctggcaaatagcaaagaagccttcgattttctcatttaaaccaccgaccggctgggcgcgaccgaactgatcgacactacctgtgatagcgatactctgattcaccggcacatcggcgagggcgcttatcagggcgcagagttcagccatgctggcactatctccatcaacttcactgtaactctgctcaaatgtcaggcttgcactgaaggggatctgttgctcaagctgtagttcgctcatcaggaacgcttgcatgatcatcatccctttcgcatggatattgccgccaagctccgctttgcgttcgatgtcggtgaattcaccatcgccaatatgcacaacgcagctaatgcgagaaggttcgccaaaagcgcgtggatgacccggaaattcaatgacgctaagggcgttaatttgcccgatgcgttcgccttcggtttcaatcaggatttgctcctgaaggatctcatcctgcatacgttcagcgaggaaaccttcgcgccattcacgctgctgcagcattaagtttagctgctcgccggagaaggtgtcgccatcacacagggaggcgacctctttacactggcggaggatccactgcgggctaagcggaagtgtttcttgttcaccggtgtagcgtgctgcttcgcggataagtatcggccaggcatccgctcccggtgcaggtaagtgattatgtctggcggtaaatgtcacccagcgacaccactgggttacactctccgcatcgacaatctgcagagtatcttcaaattcgctataaatagcctgctcactaagctctggctccatctcctggaaatcagccaaactttcgcgttcgcctaccagaatgactttcagcttcaatggcatgctaggcacagagacggggagagggcggctctcatcaaacgcaacccagtcaaaacgctcgcggttaacgatatttttcagccgcatccacagcagaggttgcgccagcagtgtacgcaaagagataatgagaataccgccatttgcctgatgcaccagaccaggctgcagggtaatgtcgccattaaactggcgcaggcagccaaagagttgctccgcttctacccagtcggcagcgacaacttgcgttaaagtcgcaaaattatcatctgcactcactgcgtgacgtaagcggatggagtggccggaaacctcatagtgaccgcccaccagttggcctgcatcgctttgtagcgtacgcgcggcattggcaataagattcagatactcagactcttccggggccttcgccagcataaaagaggaggatgctcgcgtatgcagcaactgctccagcgcaaattgcagccgcggttgagtatcactgaataaaggatcgttttcgtcaatcaaatgtggctgagcaaatatttcctgatagctatcggtatcaggaaccaggtcacgccatgcaagtttcgtaatggtcaaagttgatgttttttagtctgttgtcaaagccgcgattataccgtaaccggcactacagcacacgtagaaagcaccgacaatactcctggcatgggcgttaaagctcacaggatggagattcttttcttcactggcctaaaaagctgatattctgtaaagagttacacggtaacattgagatcgctatgaaatatcaacaacttgaaaatcttgaaagcggttggaaatggaagtatctggttaagaagcatcgcgaaggggagttaatcacccgttacatagaagccagtgccgcccaggaagccgtcgatgtgttgctcagcctggaaaatgaacccgtgctggtaaatggctggattgacaagcatatgaatccggaactggtcaatcgcatgaagcaaaccattcgggcaagacgaaagcgccattttaatgcggaacaccagcatacgcgcaaaaaaagcatcgatctggaatttattgtctggcaacgtctggctggtcttgcgcagcgtcgcggtaaaacgctttctgaaacgattgttcagctgattgaagatgcggaaaacaaagagaaatacgcgaataaaatgtcttctctgaagcaggatctgcaggcattgctgggtaaggaataactgacgaaagtcagttcaatttactaaaggcaaaaaaaaccccgcagcagcggggtttttctaccagacgagaacttaagcctgcggctgagttacaacgtctttgatacctttaacttcgatctctacgcgacgatccggagccaggcagtcgatcagtgcagcacgctgtttcacgttgtcacaggtgttgccagtaaccgggttggattcgcccataccacgtgcggagatcttgtctgccgggatacctttggagatcaggtaatcaacaacagactgagcacggcgctcggacagaccctggttgtaagcgtcagaaccgatgcggtcggtgtaacccagaacaactacggaaccgtctttcggatccaggttgctcagctggctgtacagctgatccagagcagcctgaccttccggtttcagggttgctttgttgaagttgaacagaacgtcagacttcagagtgaagtgcttggtctgtacttccggtgccggagctggagccggagcaactactggagctgcttcgccctgaccgaaacggtaggaaacacccaggctcagcatgccgttgtccggacgagtgccgatggtgtgtgcgtcaccgatgttgttggtccactggtattccagacgggtagcgatttcaggagtgatcgcgtactcaacaccgccagcgaagaccggagaaacgccggtgtcgtggtttttaccataaacgttggatttagtgtctgcacgccataccatgccacccagacgagtgtagatgtccaggtcgtcagtgattgggtaacccagtttagcggtcagttgaacgccctgagctttgtatgcaccgttttcaacgctgcctttgtacggcatacgacctaaccagtcgtaacccatttcaaagccaacatacgggttaacctggtaaccaccaaaagcaccagcgcccagttggttttcatgggtcgggccattgttgttgatgaaaccagtgtcatggtactgggaccagcccagtttagcaccagtgtaccaggtgttatctttcggagcggcctgcgctacggtagcgaaaccagccagtgccactgcaatcgcgatagctgtctttttcattttttgcgcctcgttatcatccaaaatacgccatgaatatctccaacgagataacacggttaaatccttcaccgggggatctgctcaatattaactctaccgatatcttcggcttatgccgagcacccctggcgatgtaaagtctacaacgtagttgaaaacttacaagtgtgaactccgtcaggcatatgaaaaaaaagtcttgtataaggtatgtttaatcttttttgtcagcgacaatttacagaagagaatcgcggaaaccgcttcagacaagcctccgcaaggaaaattagtcacgactgaaagcattggctgggcgacaaaaaaagttccaggattaatcctaaatttacttaatgatacaaattagagtgaatttttagcccggaaagttgtctcgtggcgtgagaggatgcgcttaccggacgcataataaaccccatagcgttaccttcatttgccgcatcaacaagttcagcatgctcttcttcagtcaaatcatctgccaaccaaccgatcaccacactgtaattgcccgtgcgtaaagcgcgaaccatactctccacagtgtggcaaggggagagctggctaatctgcattactttcgttaagggtagcccagatgcctgaacccattcccgactcagtttttgttgcggtgttaaccagagttgccagcggctttgctgaccgagttgctgtaacaatggcaacagtagaagttgcgtcatcatgggctgatcttcgcgatagacaacttcactgataagcccggctgtagtgttttccgtagagacacgcgcaattttacttgctgcggaactgaagctgctagaacgatgtgcatagccactagtgtacataatcaatccagcccctgtgagttactgtatggatgtacagtacatccagtgacaacaaagatcaaccctattttcggaaagagcctcgcaaattttgtcgttggtgacgggaaaacataaattaatcttgccccttaagaataagttgcctattttcgtagttaacggatccgttaatgtgaatcattcttttatgttatgattttaaaaggaattttatgaaaagcctctcctataagcggatctataaaagtcaagaatacctggcaacgttgggcacaattgaataccgaagtttgtttggcagttacagcctgaccgttgacgacacggtgtttgcgatggtttctgatggtgagttgtatcttcgggcttgtgagcaaagtgcacagtactgtgtaaaacatccgcctgtctggctgacatataaaaagtgtggccgatccgttaccctcaattactatcgggttgatgaaagtctatggcgaaatcaactgaagctggtgcgtctgagcaaatattctctcgatgcagcgctgaaagagaaaagcacgcgcaatacccgggaaagactgaaagatttgcccaatatgtcttttcatctggaagcgattctcggggaggtggggattaaggatgtacgggcgttacgtatacttggggcaaaaatgtgttggttgcgactgcggcagcaaaacagtctggtgacagaaaagattctgtttatgcttgaaggtgccattatcggcattcatgaagctgcgctcccggtggcacgccgccaggagcttgcagaatgggctgactctcttacgccgaaacaggagtttcctgcggaacttgagtaattacgcgctaacaggagtttcctgcggaacttgagtaatctggcgttgcagacgaccaatctcaggcagtaatgcaatcaataatccaacttgttgtacgaccagaggttctttgctgtctgcccgtggttcaagttgctgcatccgctgtttcaggctagctaatgcctcattgacgcgttcttcatcagcaggttgatgatgtaacgcgtcatcaacatagcaaactgcgtcatcaagaaacgccagaatttcaggattagttaactgctcccggtgagcaccgagggcactgatatagctggtaaacgtatggttaaggcacagcaaccgaaacgcggcttcgcgaatttgcggggtaacgttcggctcgctggacatattacttaccacgctcgccagctcagcatcacggttgtgtgcatcgcggcgggcaatacgatacgccagacggttatcacgcccctgatggtattgctccagtatggcatcgagataccgacagttggcctctgtggcacgttcgagcatgcgcggcagattgcgaaactgccagtcaggccagatgtagctcactgccgcccacgcaatggcacaaccaatcagcgtatcgattacgcgaggtaacgctacttcaaaaccttcacccagtaagttaaaacacagtagcaccaaaagtgtgatgaacatcgttgcatgagcgtattgcacgttacggaaggcaaaaaagagcacgccggtaataaccagcagcaccagctgcccttccagacttggcacaaaccacagcacaggaatgccaatggcgatacctaccagcgtaccaataatccttaacttcaggcggtggcgcgtggcgttatagtttggctggcagacaaacaaacttgtcagcaagatccaatacccgtgatgcattccggttatctgaatgatggcgtagccgaagcacaacaccaggctcattcttaccgcatgacggaagagggcggattccggcgtgaagtgacggctaagacgcagccagatatcactcaacccgtgcgggctgtcatcagcgagctcattttcgtcattattatggggtagtgcctgggcctgttcactttcaattgttgccagttgggcatcaatggcgcgtaaattgttcagcaaaaatcccagtgttttgagtaaatcggcgggtgcgccgttatcgcgcatccgctccagcgcagcatcaatatgcgtaaaagcgcgctcaaaatgcggatcatgttgataaggctgacgcaacaaaatacagcgactcagttgctggcacgcctggccctgcatgctcatcagccgctgaaaacggaacagcacgtcgctgtggcgaaaatgttcacgcaatgtttgatactgaatatgagaagagctggcacgctcgtgaatatcctgtgcgacaaagtaataatgcagcgtgcgacgcgttccccgttgaccacgatcgccacgtaagcgggtcagcaggctgagtttcgtctgattcaatgtcgccatcagcagaccgttggcgagagccaaatcgtacagcggtgcctggctttgatcttcaatatcaggatcaaacatgcggctcttgagctcaagataacgcgccagttgttcatagcaacgcgccaggttgtcctgcagcgggcggaccgggaacagcagatgaccaataagtgtcaggacgttgtaccagacggcaccggccagcagatacatcggctgctgataccagtgctcatacagacttgttcccaacatagtgtaaatggcgatcagcaatgcaccgaaggcaattgttgcatagcgttgacccagaccgccgagcaaaatgaagccgctggtagagagcgttaagccaatcgcaaatagccagggccagggaaacagcaattctacactggcgctggcgataaaaaagcagaacagcgtaatgatgaggttacgcaaacgtcccgccagtcggtcatcgagatcggtcagcgccgctgccaccatccccagcgttagcggaatcgtcagttttacatcacccagccaccacggaaacgctgtggttccacaaagcgcaataaaaatacgcgcgtaatacagccaggcgctgttccaggtatagcgtttgagcaaaggacttagcataaaggccatattagtggattattcaaaacgacgacgtgcattggcttcacgcgcagcttgcgctgtttctacgcttaccacgcgacgaccaaccggccatagtgcaatagcggcaattttaaagttcgcaatgccgacaggaatgccaatgatactaatacattgtgcgatgcccgttgcaatgtgcatcaggcataaccaccagccaaagaaaatcagccagaaaatattcaataccgtaccgccagtattcagcagcacatttttgccagccgggttcagttcatcgacatgaatagcttcattgccataaggcaccagagacagtttagtgatctcccagcaggatcgtgtcagcggtaaggtaaaaatcagcacaatactgaccagagtcgccaacagccagcccagagtggtggcaaatccgccaagcacaaagttcagaatgttcaaaacggtacgcataaaacctcgctttactgtggttttcagtaatgggcggcaattgtaacgtttttttgggctggagcacgttttctctgacggttacactgataagaaataatttcgtgtggatctacagagtcatggaactgaaagcgacaacgcttggaaaacgtctggcacagcacccttacgatcgggcggtgatcctcaatgccgggattaaagtctccggcgatcgccacgaataccttattcctttcaatcaattactggcgattcactgtaagcgcggtctggtatggggcgagctggaatttgtactgccggacgaaaaagtggtgcgtctgcacggcaccgaatggggcgagacgcagcgtttttaccatcatcttgatgctcactggcggcggtggagtggcgagatgagcgaaattgcgtctggtgttttacgccagcaactggatttgattgccacgcgcactggggaaaataaatggctgacgcgtgagcaaacctctggcgtgcagcaacaaatccgccaggctttgagcgcgttgccgttgccggttaaccgactggaagaattcgataactgccgtgaggcgtggcgtaaatgtcaggcctggttgaaagatattgaaagcgctcggttgcagcataaccaggcgtataccgaagccatgcttaccgagtatgcggattttttccgccaggtcgagtctagtccgctgaatccggcgcaggcccgggcagtcgttaatggcgagcattctctgttagtgctggcaggtgcaggaagcggaaaaacgagcgtgctggtggcccgtgcaggctggttgctggcgcgtggtgaagcgtcccctgagcaaattttattgctggcgtttggtcgcaaagccgctgaagagatggacgagcggattcgcgaacggctacataccgaagacattaccgcacgcacgtttcatgcgctggcgctgcatattattcagcagggcagcaaaaaagttccgatagtcagcaaactggaaaatgataccgctgcccgtcatgaactctttattgctgagtggcgcaagcaatgcagcgaaaagaaagcgcaggcgaagggctggcggcaatggctgacggaagaaatgcagtggagtgtgccagaaggtaacttctgggatgatgaaaaattacagcgtcgccttgcctctcgcctcgatcgctgggtaagtctgatgcggatgcacggtggtgcacaggcagaaatgattgccagtgcacccgaagagattcgcgatctgttcagtaaacgtatcaagttgatggccccgttattaaaagcctggaaaggtgcgctgaaggcagaaaacgctgtcgattttagcggccttattcatcaggcgattgtgattctggagaaaggtcgctttatcagcccgtggaagcatattctggttgatgaatttcaggatatcagcccgcagcgggcagcgttgttagcggcattacgcaagcaaaacagtcagacgacgttgttcgctgttggtgatgactggcaggcgatttaccgattcagcggtgcgcaaatgagcctcaccaccgctttccatgaaaactttggtgaaggcgaacgctgtgatttagacacgacttaccgttttaacagtcgtatcggtgaggtggcaaaccggtttattcagcagaacccaggccagctgaaaaagccgctaaacagcttaaccaatggagacaaaaaagccgtcacgttattggatgagagtcaacttgacgctttgctggataagctctctggttatgccaaaccggaagagcgcattctgatcctggcgcgttaccatcacatgaggcctgccagcctggaaaaagcggcaacacgctggccgaagttgcaaatcgactttatgaccattcatgccagcaaagggcaacaggcggattacgtcatcatcgttggcttgcaggagggaagtgatggttttccggctgcggcgcgggagagcattatggaagaggcgctactgccaccggttgaggatttcccggacgctgaagaacggcggttaatgtacgtggcgctgacccgggcacgccatcgggtatgggcactgtttaacaaagagaatccctctccctttgtggaaatactgaaaaatctggatgtgccggtggcgagaaaaccgtaagaaacaggtggcgtttgccacctgtgcaatattacttcagacggtccgcgagataacgctgataatcggggatcagaatatcgaccgcgtcgttgaaatgcgggctctggattatgaagtctgccgttgccacgttggtggcgaccggaatgttccataccgtcgccagacgcagcaaggctttcacgtcaggatcgtgcggcacggcatttagtggatcccagaagaaaatcaatacatcaattttcccttcactgatcaatgcgccaacctgctggtcaccccccattgggccactcaacatcgcgttgacgttcatgccggtcgcgcgggaaattaagttaccggtagtgcctgttgcatacagtacgtgttgttccagtaacggttgatgccgttccacccagctcatcagcatttgtttgcagtgatcgtgtgccaccagcgcaatatgtttccgcgcaggtaaagtgcgagtcgtcagttccataatgtacatccgtagttaactttcctacagattactgtaagcacttatcgctgcaagataaagaccgaaaaagcctgcgcacaggcacaaaaatctcaggaagatggttgtttttccgcccactgcaggaaagtatttcgcgtttgtgggtcagccagtttaaaccaatacttcagccgttgttctgtgagcacctgagactgcggtggaatagcatccagctcggaaacaccgctaagcagcgtactgtcatctgccatcatcgtggcaaattgcggtagactagcgcgtttcgcggatttgttatagcgttcaacctcgacctcataatcaatcgtttttgccgtactggtaatggcgagaatatccagctttaccggaatcggcgtcgcatcgccatccaacaattcaaggcgcggcgcggcatcaaaatggttagcttcccgctcattctccaggcgaggcaggcgaaaattgacctggttgatgagctgggtattaaaactgaccaccagcggtggggagatatacagccgttcttcactattggaaagatgaatcgtcttctcaacgcgaaacactaactgatgcggtccattatccagttcaatgctgtccgcaccgcgcagcagagagctggaaaccttcttgccgtcgagtaccagaagatcgacatcggtactaagccgcagcgtggtggcaaaaacggataccggcaaacataatgcaatcaaggtggtcacgatgccggttttcataggtagctcctgtcaaaagaccgcccgaataataatgtgtcaaaatttttctttaatcatacttactaacatatagacatatttcccgcttttgctctcattcattcgtattagctgcatggttggcatgtcggctttgtcgtacactttgttaaacagtctggaggaaataatgaaagaaaccgatattgcaggcattttaacgtccactcacaccattgcgctggtgggggcaagcgacaaacccgatcgtcccagctatcgcgtgatgaaatatctactcgaccaggggtatcacgtcattccggttagcccaaaagttgccggcaaaacgctgctgggccagaaggggtatggcacgctggcagacgttccggaaaaagtcgatatggtcgatgttttccgtaatagtgaagcggcgtggggcgtggcacaggaagctattgccattggcgcgaaaactctctggatgcaactgggggtgattaatgagcaagcggcagtactggcacgggatgccgggttaaatgtggtgatggatcgctgcccggctattgagatccctcgcctgggcctggccaaataaaaaatccccggaaggcaaaaaccttccggggatttgttcagggattagttacgcagacgcggggcctggagttgtttgcggatggtctgcgccagctcatccatggatggctgttcaggatgttcatcctgcaattcgctacttagctgggcttcagccaggtaggtatgaaccggtaggccgttatcgtcctccatcactacgtgataccacggagcggcgcgaagctcgtcattcaccgccagctcatcagggctcggttcagagaggctataaaccgggtcgatatccacgaccactccgagataacctaacagggaatggcggacctgctggccgataccgaatttgctggcaatcatagtcacctcccgggaaatctttacctttgatataagggtaaaattccacatttcaagttacatgacgcgacaggcaaaccctttcagatatagcccttccggataggtagcgatcaccggatgatcggctgcctgacggaactgctctataaattgtacatcacgaccggcatcaattgcggcatccgcgatgattttctgaaataaatcgctggtcatcagaccggaacaggagaaagtcaggagaataccgccttcattcagcagctgaatcgccagcatgttgatgtctttataaccacgacacgcgcccatcaactggcttttattctcaacaaacttcggcgggtccatcacgataacgtcaaatttttcaccgcgatcgcgataagtacgcagcaatttaaagacatcatcacggacaaactcagccttgctcagatccagtttgttcagctcaacgttctgccgtgcaatatccagcgcttcctgggaggtatcaacgctgacaacctggctgcaaccgcccatcagtgcgcttacggcgaaaccaccggtataggagaaacagttcagcacacgtttattttcaacgtagcggcgggtagccaggcggctatcacgctggtccaggtagtagcccgttttgtgtccgtgctgaatatccaccagcagtttcattccgtgttcttcaatcggcagcagggcaggtggcaactcgccggtgacggggccctgggtcagctccattccttcttttttacgtaccgcgacgtcgctgcgatcgtaaatgctacattccgggtacagcgtttgcagggcactaattaatgccgcgcgctgatattctgccccagcactcagcagttgcagcaccagaaaattaccgaaacgatcgatagtaatacccggcaggccatcagattctccggcgattaaacgatagctgtcgaggccatctttttgcgccagccagtcacgccatttttgtgcttgttgcaaacggcgggaaaaaaaagcaatgtcgatagactcagacgggtcaaacgtccagacgcgcgcccggatttggctagctgggctataagcgccgcgtgctaaccattttccctgatgatcaacaatatcgatggtttcaccgaggctggctttaccttccatgcgggcaacggccccggaaaagacccacggatggcgacgaagtaatgatttttcgcgccctttggctaacactaaacgtacactcataatttacttttctgtcgatgcaaagaaatgggcgtcattgtccggagttttccatggatttgcaacgcgtccattaaggataaggagagcagcaatgagcaaagtctgcataattgcctgggtttacgggcgagttcagggcgtaggatttcgctacaccacacagtacgaagcgaaaagactgggtttaaccgggtacgccaaaaatcttgacgatggcagcgtggaagtggttgcttgcggtgaagaagggcaggtggaaaaattaatgcagtggttaaagagtggcggcccgcgttctgcgcgtgtagaacgggtgctcagcgagccgcatcatcccagcggggaattaaccgattttcgtatccgttaaatacattttaccggttttggcaggccagcaattttggtggcttgcttagccggacctttcggaaacagtcggtataaatagcggctgttacctttttcttcgccaaatttattcgccatcgcttttaccagcatacgaatcgccggagaagtattgaattccagatagaaatcacgcacaaaacgcaccacttcccagtgttccggactcaggctaatcccttcgttctctgcaatcaccacagccagcggctcactccactggctgctttctttgagatagccttcggtatccgtttctatctctttaccttcgaagatcagcataattattactaccttaatcagactggcggcagtgtaacaaaaaacaaagccccgcataaagcgaggctatgaaagtgttagcgggtgagattaatcgcggctagcgaagcccagaatgctcagcaggctgacgaagatgttgtacaggctaacatacaggctaaccgtggcacgaatatagttcgtctcaccgccatgaatgatgttgctggtttcaaacaagatagcgccagaggagatcagaatgaagaccgcgctgatcgccagatgcagagcaggcagctgcaggaagatattcgcaaccataccaatcagcaccaccacaatacccgccatcagcataccgccgaggaagctcatatctttgcgggtggtcagcacatatgcagagcagcagaagaacactaacgccgttccgcccagtgccatagcgattacgtcacccattccggcagacagataggtgttcagaataggtccgaggatataacccagaaaaccggtaaaggcgaatgcggagataatcccggtcggcttattcgccgttttataggtcaggaacatcaaaccatacatacccaccagcgtcagaatcagacccggagatggcagcatcagcaccgtactggcagttgcggtaatcgcgctaaaggccagcgtcaggctcagcagaaaataggtattacgcagcaccttatgggtgctaagcagacttgtacggtcatgactagaactaacaatacgatccattgagtcactctctatgacagatgtaattaattaagcagcataatgataatgcgtaagggcacccagaagttttacccatctttacgcatttgatctggaacaggtttaacagcggattatcaggtcattaagcaaatataacgccctgagaatttcgacaggcaaaagaaaaaggggttagcatttagctaaccccttatcttatttggcggaagcgcagagattcgaactctggaaccctttcgggtcgccggttttcaagaccggtgccttcaaccgctcggccacacttccggaatgacgcgcactataaacatcccgatgcggcgtgtaaacccctaatttgtttgtttgcctgaaaaacagccaaaagtgcattgatagcgtgaaataacagcagattgatcatttcatcaccatgaattccttctcttttactcgtttagcaaccggctaaacatccccaccgcccggccaaaagaaaaataggtccatttttatcgctaaaagataaatccacacagtttgtattgttttgtgcaaaagtttcactacgctttattaacaatactttctggcgacgtgcgccagtgcagaaggatgagctttcgttttcagcatctcacgtgaagcgatggtttgccttgctacagggacgtcgcttgccgaccataagcgcccggtgtcctgccggtgtcgcaaggaggagagacgtgcgatatgaataacgaggaaacattttaccaggccatgcggcgtcagggcgttacccggcgcagctttctcaaatattgtagtctggctgccacgagcctgggattaggcgcgggaatggcaccaaagattgcctgggcgctggagaacaaaccgcgcattccggtggtatggatccacggtctggaatgcacctgctgtaccgaatcttttatccgctccgctcacccactggcgaaggacgtcatcctttccctgatttccctcgattacgacgatactttgatggctgccgccggaacccaggcggaagaagtctttgaagacatcatcacgcaatacaatggcaaatatatcctcgcagtagaaggtaatccgccgctgggcgagcaggggatgttctgtatcagcagcggtcgaccgtttattgagaaactcaaacgtgccgctgccggagccagcgcgattatcgcctggggaacctgcgcgtcctggggctgcgtgcaggccgcgcgacccaatccgacgcaggcaacgcctatcgacaaagtcatcaccgacaaacccattatcaaagtacctggctgcccgccgatcccggatgtgatgagcgccatcattacttacatggtgacctttgatcgcttgccagatgtcgacagaatgggccgtccgctgatgttctatggtcagcgaatccacgataaatgctatcgccgcgcccacttcgacgccggagagttcgtccagagttgggatgatgacgctgcccgcaaaggttactgcctgtacaaaatgggctgcaaagggcctaccacctataacgcctgttcctccacacgctggaatgatggcgtttctttcccaatccagtctggtcacggctgcctgggctgtgcggaaaatggtttctgggatcgcggtagcttctacagccgcgtggtcgatattccgcaaatgggtactcattccaccgccgataccgtcggtttaaccgcgcttggcgtggtggcagcggctgttggtgtgcacgcagtcgccagcgccgttgaccagcgcagacgtcataaccagcaacctacagaaaccgaacatcagccaggcaatgaggataaacaggcatgagcactcagtacgaaactcagggatacaccatcaataatgccggacgccgcctggtggtcgacccgattacgcgcatcgaaggccacatgcgctgcgaagtgaatattaacgatcagaatgtgatcaccaatgccgtctcctgcggcaccatgtttcgcgggctggagatcatcctacaagggcgcgacccgcgcgatgcgtgggcgttcgttgaacgtatctgcggcgtctgtactggcgtacacgccctggctagcgtttacgccatcgaagatgctatcggtattaaagtgccggacaacgccaatatcatccgcaacattatgctggcaacgctctggtgccacgatcatctggtgcacttctatcagcttgccgggatggactggatcgatgtgttagatgcgctgaaagccgacccgcggaaaacctccgaactggcgcaaagtctctcctcttggccgaaaagttcccctggctatttcttcgacgtacaaaaccgcctgaaaaaatttgttgaaggcgggcagttggggatcttccgcaatggctactgggggcacccgcagtacaaactgccgccagaagctaacctgatgggctttgcccactatctcgaagctctcgatttccagcgtgaaattgtcaaaatccacgcggtctttggcggtaaaaacccgcatccaaactggattgtcggcgggatgccttgcgccatcaacattgacgaaagcggcgcggtcggggcagtcaatatggaacgcctgaacctggtgcagagtattatcacccgcacggcggacttcattaacaacgtgatgatccccgacgccttagccatcggtcagttcaacaaaccgtggagcgaaatcggcactggtctttctgataaatgcgttctcagctacggcgcattcccggatattgccaacgactttggcgagaaaagtctgctgatgcctggcggcgcggtgattaacggcgacttcaacaatgtgctgccagtggatttggttgatccgcagcaggtgcaggagtttgtcgaccacgcctggtatcgatatcccaacgatcaggtcgggcgtcatccgttcgatggcatcaccgacccgtggtacaaccccggcgatgtcaaaggcagcgataccaacattcagcagctgaatgaacaggaacgctacagctggatcaaagcgccacgctggcgcggtaacgcgatggaagtggggccgctggcgcgcacgttaatcgcttatcacaaaggcgatgctgcgaccgttgagagcgtcgatcgcatgatgagcgcgttgaacctgccgctttccggtatccagagtacgttaggccgcattttgtgccgcgcgcacgaagcgcagtgggccgcaggtaagttgcagtatttcttcgacaagctgatgaccaacctgaaaaacggcaatctcgccactgcttccacggaaaaatgggaacctgcaacctggccgacagagtgccgtggtgtcggttttaccgaagcgccgcgcggggcgttaggccactgggccgccattcgcgatggcaagattgatctctaccagtgcgtggtgccgaccacctggaacgccagcccgcgcgatcccaaagggcagattggcgcttatgaagcggcgctgatgaacaccaaaatggcgatccccgagcaaccgctggagatcctgcgtactctgcacagctttgacccgtgcctcgcctgtagtacacacgtgctgggcgacgacggtagcgagctgatctccgtgcaggtgcgttaacagcgaaggagaatcatcatgcaacagaaaagcgacaacgttgtcagccactatgtctttgaagcgccagtgcgcatctggcactggttgacggtgttatgcatggcggtgttgatggtcaccggatactttatcggcaagccgctaccttccgtcagcggcgaggcgacgtatctgttctatatgggctacatcaggttaattcacttcagcgccgggatggtttttaccgtggttttgctgatgcggatctactgggcttttgttggcaatcgatactcccgcgagctgtttatcgtgccggtatggcgtaaaagctggtggcagggcgtgtggtatgaaatccgctggtatctgtttctggcaaaacgtccgagtgccgatataggccataatcccatcgcccaggcggcgatgttcggctatttcctgatgagcgtctttatgatcatcactggttttgcgctgtacagcgaacacagccagtacgctatttttgcgccgttccgttatgtggtggaatttttctactggacgggtggcaacagtatggacattcacagctggcatcggctggggatgtggctgattggcgcgtttgtgatcggtcatgtctacatggcgctgcgtgaagacatcatgtccgacgacacggtgatctccaccatggtcaacggctaccgtagccacaaatttggcaaaataagtaacaaggagcgtagttgagctaaataagtaacaaggagcgttcatgagcgagcaacgcgtggtggtcatggggctgggcaacctgctgtgggccgatgaaggcttcggcgtgcgggtggcggaacggctgtatgcccattaccactggcccgagtatgtggagattgtcgatggcggtactcagggactgaacttgctggggtatgtcgaaagcgccagccatctgttgattctcgatgccattgactacgggctggaacctggaacgctgcgaacctatgccggagaacgcattccggcttatctcagcgcgaagaaaatgagcctgcatcagaacagtttctccgaagtgttggcgctggcggatatccgcggacatctgccagcacatattgccctcgtcggtctgcaacccgcaatgctcgacgactacggcggtagcctgagcgaactggcacgggagcaactgcccgctgcggaacaggcggcgctggcgcagcttgctgcgtggggaattgtgccgcaaccggctaatgaaagccgctgtctcaattatgactgtctgagcatggaaaattacgaaggcgttcgcttgcgccagtaccggatgacacaggaggagcagggatgagcaacgacacgccatttgatgcgttgtggcaacgaatgctggcgcgcggctggacgccagtcagtgaatcccgtcttgacgactggcttacgcaagcgccagacggcgtggtgttattaagcagtgacccgaaacgcacgccagaggtcagcgataatccggtaatgattggcgaattactgcgcgagtttcccgactatacatggcaggtggcgattgctgaccttgagcagagcgaagccatcggcgatcgctttggcgtctttcgctttcctgccactttagtgtttaccggcggaaactatcgcggcgtgctgaatggtattcacccgtgggcggaactgataaacctgatgcgcgggcttgtcgaaccgcagcaggagcgtgccagttgatctaaccgcagcaggagcgtgcctcatgagcgaaacttttttccatctgctggggccaggaacgcaaccgaacgatgacagtttcagcatgaatccactgccgatcacctgtcaggtgaatgatgaaccgagtatggcggccctggagcaatgtgctcacagcccgcaggtgattgcgctgttaaacgagttacaacatcaactaagcgaacgccaaccgccgttgggcgaggtgctggcagtcgatctgttaaatctcaacgccgacgatcgtcactttatcaatacgcttctcggggaaggggaagtgagtgtgcgcattcagcaggctgacgacagtgaaagtgaaatacaggaggcgatcttctgcggattatggcgggtgcgcagacgtcgcggcgaaaagttgctggaggacaaactggaggctggctgcgcgccgctggcgttgtggcaggcggcaacgcaaaatctcttgccgacagatagcctgttaccgccgcccattgatggcctgatgaatggcctaccgttggcgcatgagttactggcacatgtacgtaaccccgacgcgcagccgcacagcattaatctgacgcaattacccatcagcgaggctgatcggctttttctcagtcgtctctgtgggccgggaaatattcagattcgtaccattggctatggcgagagctatatcaacgccacggggttacgccatgtctggcatttacgctgtacggacaccttaaaaggcccgttactggaaagttatgaaatctgcccaataccggaagtggtgctggcagcgccagaagatttggtcgactctgcgcagcggcttagcgaggtatgtcagtggctggcggaagctgcaccgacgtaaaaagacggtaagtatcgctttcagtcttatgaatatcgcaatcggcgaatacctctggtcgtagagtttcaggataaagagggagatctaccattatcgggttatttttctctcttcgcctacaggagtgcgcatgtgggatgtcattgatttaagccgctggcagtttgctctgaccgcgctgtatcactttttatttgtaccccttaccctggggctgatttttttgctggctattatggaaaccatttacgtggtcaccggcaaaacaatctaccgcgatatgacgcgcttctggggtaagctcttcggtatcaattttgctcttggcgtggctaccggcctgaccatggagtttcagtttggtactaactggagtttctattccaactatgtgggcgatatttttggcgcaccgctggcgatggaagcattaatggccttcttcctcgaatccacctttgtcgggctgttcttcttcggctggcaacggctgaataaataccagcacctgctggtgacgtggctggtggcgttcggtagtaatctctctgcgttgtggatattgaatgccaacggttggatgcaatacccgaccggtgcgcattttgatatcgacaccctgcgtatggagatgaccagcttcagcgagctggtctttaatccggtcagccaggtgaaatttgtgcacaccgtaatggcgggctacgtgaccggggccatgtttattatggcgatcagcgcctggtatttactgcgcggacgggagcgcaatgtcgcattacgcagctttgccatcggttccgtcttcggtactctggcgattatcggtaccctgcaactcggagacagttctgcgtatgaagtcgcgcaagtacaaccggtaaaactggcggcgatggaaggggagtggcaaacggaacctgcacctgcaccgttccatgtggttgcctggccggaacaggatcaagagcgtaacgcctttgccctcaaaattcccgcgctgctagggatcctcgccactcacagtttagataaacccgtgccgggtctgaagaatttgatggctgaaacctacccacgcttgcaacgcggacgtatggcctggctgttaatgcaggaaataagccaaggcaatcgtgagccgcatgtgttgcaggcattccggggactggaaggtgacctgggctacggcatgttgctctcccgctatgcgccggatatgaatcatgtcacagccgcacagtaccaggcggcgatgcgtggcgcgatacctcaggttgcgccggtattctggagtttccgcatcatggtgggctgtggttccctgctgctactggtgatgctgattgcgcttgtccagacgctgcgtggcaaaatcgaccagcatcgctgggtgctgaaaatggcgctctggagtttgccgttgccgtggattgcgattgaagccgggtggtttatgaccgagtttggtcgtcagccgtgggcgatacaggacatcttaccgacatactccgcgcactccgctttaaccacaggacaactggctttcagtctgatcatgatcgtagggctttacaccctgttcttaatcgccgaagtctacctgatgcagaaatatgcccgtctggggccgagcgcgatgcagagtgaacaaccgacgcagcaacaggggtaaaggagaaaatcatgtttgattatgaaacattgcgcttcatctggtggctgctgattggcgtgatcctggtggtctttatgatctccgacggatttgacatggggatcggctgtctgctgccgctggtggcgcgtaatgatgatgaacgccggatagtgataaacagcgttggtgcacactgggaaggcaaccaggtctggttgatcctcgctggtggggcattatttgccgcctggcccagagtgtatgcagcggcgttttccggcttttatgtggcgatgatcctggtgctgtgcagtctgttcttccgcccgctggcctttgattatcgcggaaaaatcgccgatgcacgctggcgtaaaatgtgggacgccggtctggtcatcggcagtctggtgccgccggtagtcttcggtatcgccttcggcaacttgttgctcggcgtgccgtttgccttcacaccgcaattacgcgtggagtatctcggcagcttctggcaactgctgacgccattccctttattgtgcggattgctcagccttgggatggtgattttgcaaggtggcgtctggttacaactgaaaactgttggtgtgattcatctgcgtagtcagctggcgaccaaacgcgctgcactgttggtgatgctgtgctttttgctggcgggttactggctgtgggtcggtattgatggctttgtactgctcgcccaggatgctaacggtccttccaatccgttaatgaaactggtggcagtgctacctggtgcctggatgaataattttgtcgagagccccgttttgtggatcttcccgctgctgggattcttctgcccattgctgacggtgatggcgatttatcgtggtcgcccgggttggggatttttgatggcaagtttgatgcaatttggcgtgattttcacggcaggcatcacgctgttcccctttgtcatgccgagtagcgtgagtccgatctccagcctgacgttgtgggacagtacttccagtcagctgacgctgagcattatgttggtaatcgtgctgatatttttgcccattgtgttgctctacactctctggagctactacaaaatgtgggggcgcatgacaacagaaactctccgccgtaacgaaaacgagttgtactaaggagcagaaacaatgtggtatttactttggttcgtcggcattttgttgatgtgttcgctctccacccttgtgttggtatggctggacccgcgtctgaaaagttaacgaacgtaggcctgatgcggcgcattagcatcgcatcaggcaatcaataatgtcagatatgaaaagcggaaacatatcgatgaaagcgatcttaatcccatttttatctcttctgattccgttaaccccgcaatctgcattcgctcagagtgagccggagctgaagctggaaagtgtggtgattgtcagtcgtcatggtgtgcgtgctccaaccaaggccacgcaactgatgcaggatgtcaccccagacgcatggccaacctggccggtaaaactgggttggctgacaccgcgcggtggtgagctaatcgcctatctcggacattaccaacgccagcgtctggtagccgacggattgctggcgaaaaagggctgcccgcagtctggtcaggtcgcgattattgctgatgtcgacgagcgtacccgtaaaacaggcgaagccttcgccgccgggctggcacctgactgtgcaataaccgtacatacccaggcagatacgtccagtcccgatccgttatttaatcctctaaaaactggcgtttgccaactggataacgcgaacgtgactgacgcgatcctcagcagggcaggagggagtattgctgactttaccgggcatcggcaaacggcgtttcgcgaactggaacgggtgcttaattttccgcaaagtaacttgtgccttaaacgtgagaaacaggacgaaagctgtagtttaacgcaggcattaccaagcgaactcaaggtgagcgccgacaatgtcagtttaaccggtgcggtaagcctcgcaagtatgctgacggagatatttctcctgcaacaagcacagggaatgccggagccggggtggggaaggatcaccgatagtcaccagtggaacaccttgctaagtttgcataacgcgcaattttatttgctacaacgcacgccagaggttgcccgcagccgcgccaccccgttattagatttgatcaagacagcgttgacgccccatccaccgcaaaaacaggcgtatggtgtgacattacccactagtgtgctgtttatcgccggacacgatactaatctggcaaatctcggcggcgcactggagctcaactggacgcttcccggtcagccggataacacgccgccaggtggtgaactggtgtttgaacgctggcgtcggctaagcgataacagccagtggattcaggttagcctggtcttccagactttacagcagatgcgtgataaaacgccgctgagtttaaatacgccgcccggagaggtgaaactgaccctggcaggatgtgaagagcgaaatgcgcagggcatgtgtagcttggcaggttttacgcaaatcgtgaatgaagcacgcataccggcgtgcagtttgtaatgcataaaaaagagcattcagttacctgaatgctctgaggctgatgacaaacgaagaactgtctaatgcgtagaccggaaaaggcgttcacgccgcatccggccactttcagtttgcaatacgtacgcttgagatcaggattgtctactttgagtataacatccttgtgaaatctccctttcctcataccgcttgcactatatactgcgggtaggaaaggcgcgcagagggaaatataagattgttaactatccccctctggaaatacgacttgtgagcataagataaatcttagcaaaatacaaattaaagataaggaaattgttacgaaagctattaattattgttggtaatatagtttcaagtggtactataactggctgttaaatggcatttataactattaggtgcagagatattcgcttaaatggattagtttctttgtggaaaagtaactgatgttataatgtatgatgttgactatttcactattccaataaaaccagtcagctttaaacaagcagcgtcatattaagagagataaacatttgccgctgttggtcctcgcaggccatttacgcggcaaaattccacacgtaatcctggtataagcacttctgcgtcgcggggagtgaatgcggaaatatggacctgaacttctttacgaccgtcggaggggataatgaatcctttgccgcttttgcgatcaaaggttttgacaattcctgtcattttacgggacaaacaaattccttactgaaaatactgcgctgcactatacggggttaataaaataaagccagcgatatttaagaccgccggacggctaaaataaaatttgcttaatctcaattatcatgcgttaatagctgcgtcggtttgaaagacagacagcatacaaagtagtttactaaagcagttctcattatcaggcattatccccttcttttgagtctctctcctgaacactaagtagtttctgtattaaagccctgtttgccgaaaggcccaaaatgaaggaagtaaaatatgtctaataaaatgactggtttagtaaaatggtttaacgcagataaaggttttggctttatcactcctgatgatggcagcaaagacgttttcgtccatttcaccgccatccagagcaatgaattccgcacgctgaacgaaaatcagaaagttgaattttctattgagcaggggcaacgtggccccgcggcagcgaacgttgttacgctctaaggttgccattattactcaacatctccatttccgctgtccatgttgtcatggttcacagtaccgcacatcggcattcgatgtgacggagcgaaaccctttgggcgctaagtgtattttttgtaaatcgacgatgatcacctttgataacgtcgcgctgcaaatacgcactgaccatgcgccgctggattagtcaaaataatatcaggctccctcgtggagccttttttatatctgccttatttttcttcaacgctgtatgtatagtaagcgataacctgttgattattgaatctttcggggagatggcttataacatttcttacctgaccagggtaccgggaaccaacaccttactggcgtgttgctgtcttttaagaccagaagaggttaacagtgaatattgaagagttaaaaaaacaagccgaaacggaaatcgccgactttatcgcgcaaaaaatcgccgagctgaacaagaatacagggaaagaagtctctgaaattcgcttcaccgcacgagaaaaaatgaccgggcttgaaagttatgatgtcaaaatcaaaataatgtgattttgtgaacatcaccccgtgcgaggtgatgttccgcttgttgctaatttagtgaccaatcattggcgcttgtggaattaagcgtcggtacaattcctccggcaccgggctttgccatactcccgcatacattgcgtaaccaatcaccgcaaacataatccccagaaccagtagcgtcattaaccagccagacaacgcaaaggcttttttatttgccgcaggtttttgcagactaaaggtcaatgtactggctaccggacaactctctacgcaagtcatacagccggtacattccactgttcgtacctgaattaatttatcgaccgggatccgacttgggcaattttttgcgcatttgccacagtcgatacaactttcggcattgcgacgaatcttaaacgggctcaataggctaaccacgcccatcagcgcgccatatgggcaaagataacgacaccaggcatggcgaataaacaggctggcaatcagcaaaacggtcacgctgattaatgtcgcggtccccatatgacgaaagaaatcgagcattttaacgtccatcaccacgctgtaggggctcaacataaaatagtgaatcgcctgagcgggcatcaataacgcgatatagataaaaaaactcaacagcaaatacttcacgccgcgcagaggaatatccagccagcggggaaggacacattgccgaccaaacagtttgttaccgagatcgccgattaattcagaaagcgtaccaaccgggcataaccaactgcaaaaggcctttttgagtaatagactgatgacgataaaagcgaccaataacagcatcgcggcggcgtggacggacggtaactgacctgttacaaggctatatttcagattcatcagcccggcaatcggtagccagccttcgatacctcccggtctggcgacaaatgtcgtgctacttgccgtttcgtaatagcgcacccaataccagaacgtgatggcaatataaatattcattgccaacagtaataattgcgtcgctttacgccaggtcgtggcattacgccagtcattccacggtaatttgccgcccgtcgtgcctggccgccgctgccagcgggttcttttattctctgccatgattttgccagtccgttaagttgtataccaaatgccactattctagttgttcttaactggctgatattgattcaaatcgcgttcaggtctttcttatgcaaccatgcttccagagcggcaacactgcgtgtaatttcttcgtgtggaaggggggcagataatggctgctgctccagttgtgcgcatagctggctggcgatatgcattcccagactgctgcaactgctttttagctgatgcgcggcacgctttattttctcgctatcctgactggcgcgggcaatgtcgatttcatcgagaagcggcagggcatgttgtgtaaataataccagccattcgtggatcttctccgtccccattaactgagcatcttcattgagttggcttacatccaggctttgatcattattgacttgcagttggagatagtgcgccagtaactgaccgagcacttcacgcggcaccggtttagggataatcccgcggaataaactactggtacgctggcgcagcgtttcgtcaatgacatgggcgctaaagccaatcaaaaccaggctcggatattgctgtgccagttgtcgggcaagcgtaatgccgtcgatatccggcagatcaaaatccaccagtgcggcagcaaacggttcgctattttgcagtgtctctaaagcctgcgcggcattgccaacagcaacaatctgcgcaccactggttttcagcatctcaatggtaattcgctgggttagcgggttatcttcaattaacagcaaacgtaaaccgtcaagacgcaccgcctgattgactgtttttggcacgggtgccgtggcaacacgtaacggcaagcgtaaacaaaaacagcttccaacctccggcgtgctggtggcgctcagttcgccgcccatcgcctgggccagacggctactgatagtcagtcccagcccggtgccgccgcgtttgccgcttacctgcacaaatggctggaagatttctgccagtttcgcgggatcaataccgcagccgctgtcttccacttcgaccagccattgctcgccatcagtgcgactacgcaggataatgtacccttcgtcagtaaaacgcagggcgttgctcaacaggttggttataacctgacgaatacgtcgtggatcgcccattaacgcgcacggcatatcatcggcaattgccgttgccaggcgaatcgggcgacctttcacccgtccgctcattaattgcagggtactttccagcagcgggcgcggttcaaagggctcatcgctgacgctaacattcttgccacctgcttcgatagcggaataatcgagaatatcgttgaggatggtcagcaagctttcaccagagtcagtaattgcccgcaaatcatcacgctgggcgttaagtgcggggttatctgccagcagttgagcagtgccgagaataccgtacagcggtgtgcggatctcatggctcatcgccgccagaaacgcgctttttgcctggctggctttttctgcttccgcccgtgcctgtcggtgttctatcaccagttcctgcaattcagctgtacgcgctttgacctgcgccgccagctgttcgcggtggcgattcagtgcatgaacattgctgcgaaacgcatccatcagccgcccgatggtatccagctcccgtacgccagcggtttccgggaaaggggagtcaatatcaccgtccagcagccgttgcagcgcctgcgtttgttcggcaagtggacgcgtgacactgcgataaaccacgcgccagaggatcagaatcagtgcgcaaagactaaccatccccagcaataacaggctgtattgcccgcgtgcactcgctttttccagatgcgccagtccgtgctgattacgcagctcaatggtgtcgaccagctgactgacttcgctactaaactgcgcgaactgggcgatgttattttgtgcgagagtttgtaggtgattgctgatttcactgtcctgctgatacagcgccagcaaatcgctatattggctaacggtagttaacgttgttgcgacctgcgcacgaacacccggatcttcaatgcgtatttgccgacgttgcagaattttcaccgcattattgagctgcttttccagcgttggtgcatttttctggatctgctccagccccagattcatcaccatttgctgcacccgcagagcgctaaggcgcagttcattcatctggttaacatactcaagatcgatatcaatcagccgatcgagtgcactttcagcagcctgacgctgatcttgttcgatcaaatcgtaaatcccggcctgggtcgctccagcggaagttgtcgcattattcgcctgaccttgcgccaggcgtgcgatctcatcggcggcagcgactatctgctgactgagttgctgttgttgctggcgcagttgcaaacgctgccccaccagttccccttgctgacgtaagctacgggagatctcctgctcctgttgttcaatagcggtggtatcaaaaccttgttcccgtaacgcttgcagcaacgcattaatcttcaggctttgtgcggtgagcattcgcccctgcgcctgccacatcttttcgttatcggcactggtcaggttctgcgcggcgaaaagttcccaggcgctggcttcgctcaactggcgcgccatattcatggtaggaatcaatgcctgagtgttgtctttttccacctggctgataaagcgcaggttgtaccatcccaccagggtactggtcagggttaacagcgccatcagggcaaagcccatccagagtcttcgggtcagggttaaattcacggtcggtgcactttaggtgaaaaaggttgagtcgcaaagcggaatgcatctagcataaagccttattattgatgaggctatcatgcgcgtactgctatttttacttctttcccttttcatgttgccggcatttagcgctgataacctgttgcgctggcatgatgcgcagcatttcacggtgcaagcctctacgccgcttaaagccaaacgcgcatggaaactgtgcgcgctttatcccagcctgaaagatagttattggttaagcttgaactatggtatgcaggaggctgctcgccgctacggtgtggatttaaaagtgctggaggcaggcggctacagccagttggctacccagcaagcacaaatcgaccagtgtaaacagtggggcgcagaggccattttgctcggtagtagcacgaccagttttcccgacctgcaaaagcaggtagcaagtctgccggtgatcgaactggtaaatgctattgatgctccccaggtgaaaagccgcgttggtgtgccctggtttcagatgggctatcaaccggggcgatatctggtgcaatgggcgcacggtaaaccactgaatgtgctgttgatgcccggacccgataacgccgggggcagtaaggagatggtcgagggttttcgcgcagccattgccggaagcccggtgcgtattgttgatattgcgcttggtgataacgatattgaaatccagcgtaacctgttgcaggagatgctggaacgccatccagaaatcgacgtcgttgccggaacggccattgcggcagaggcggcaatgggggaagggcgtaacctgaaaacgccgcttaccgtggtgagcttttatcttagtcatcaggtgtatcgcgggctgaagcggggaagagtgattatggctgccagcgatcaaatggtctggcagggggaactggcggttgagcaggccatcaggcaattacaggggcaaagcgtttctgataatgtcagcccaccgattttagttctgacgccgaaaaatgccgaccgtgaacatattcgccgcagcctgagtccagggggatttcgtccggtctatttttatcagcacacaagtgcggctaagaaataatcagcacacatcagcggctaagaaataaccttcaccatgttgcgtcaccagtaaatccgcgctgagtttatgacgtaaacgacgaattaacacatcgacggtgcgcaggtcagggttttccacccgacgcgcagaaagcatacgtagcagacgttcacggctgagaatttcgcccggattcgtcacaaatgccaccaacatttcatactctgcgcgggtcagtttaatcggctcgccatcccgctccagcgtatggcggctcacattcaggcaataaccggcaaagcgatagcagttgtcctgagtgtgcggttgagcttgtcgcgcgaggtcgattcgccagagcagatttttcacccgtactaccagttcgcgcagttccagcggtttggtgacgtaatcgtctgcgcccatttccagcccaacaatacggtcaatccgatcgctgcgtccggtaaccagaataatccccaccgtactgcgttctcgcagggcgcgggttaacatcaggccattttcatcgggtaagttgatatccagcagaattaaatctacgctctgattctgcataatttcccgtagcccagcaccgctcgccgtaacggaaacggtatacccctcctgagtgaagtaggattgtaatcgcgcctgggtaaccggctcatcttcaacaataacaatgtgatgtggcatcagagggttttactcattctgttcatatctgttcatattctgccgtaagccgttcatcctgaccagtgccgctgttcatatttgctcattaagatcgcttcactaaaccataattctacaggggttattatgcggaaactctggaacgcgctacgccgacccagtgctcgttggagcgtactggcgctggtcgcaattgggattgtgattggcattgcgctgattgtattgccacacgttgggatcaaagtcaccagcacaaccgaattttgtgtcagttgccacagtatgcaaccggtgtatgaagaatataaacagagcgtgcatttccagaacgcctccggcgtgcgagctgaatgccatgactgtcatatcccgccggatattccaggcatggtgaagcgcaaactggaagcgagcaatgatatctaccagacctttattgctcactccattgatacacctgaaaaattcgaagccaaacgcgcggaacttgccgagcgtgaatgggcgcgaatgaaagaaaacaacagcgcaacctgccgctcctgccataactacgatgcgatggatcatgcgaagcagcatcctgaagcagcacgtcagatgaaggtggcagcgaaagataatcaatcctgcatcgactgtcataaaggtattgcccaccagttaccggatatgagtagcggcttccgtaagcagttcgatgagctgcgcgccagtgctaatgacagtggtgacacgctgtactctattgatattaagccaatttatgcggcgaaaggcgataaagaagcctctggttctctgctgcctgctagcgaagtgaaagtccttaaacgtgacggcgactggctgcaaattgaaattaccggctggacggaaagcgccggacgtcagcgtgtactcacccaattcccaggtaaacgcatctttgttgccagcattcgtggtgatgtgcagcagcaggtaaaaacgctggagaaaaccaccgttgccgacaccaataccgagtggagcaagttgcaggccactgcgtggatgaagaaaggcgacatggtgaacgatatcaaaccgatctgggcttatgcggatagcttgtacaacggcacctgtaaccagtgccacggcgcaccggaaatcgcccactttgacgctaacggttggatcggcacgctcaacggcatgattggctttaccagtctcgataaacgtgaagaacgcaccttgttgaaatatctgcaaatgaatgcgtctgacaccgcaggtaaggctcacggcgataagaaggaagaaaaataatgaacaataacgatctctttcaggcaagtcgtcggcgttttctggcacaactcggcggcttaaccgtcgccgggatgctggggccgagtttgttaacgccgcgacgtgcgactgcggcgcaagcggcgactgacgctgtcatcagcaaagagggcattcttaccgggagccactggggggctatccgcgcgacggtgaaggatggtcgctttgtggcggcaaaaccgttcgaactggataaatatccgagcaaaatgattgccggattgccggatcacgtacacaacgcggcgcgtattcgttatccgatggtacgcgtggactggctgcgtaagcgccatctcagcgatacctcccagcgcggtgataaccgttttgtgcgcgtgagctgggatgaagccctcgacatgttctatgaagaactggaacgcgtgcagaaaactcacgggccgagtgccttgctgaccgccagtggttggcaaagcacggggatgttccataacgctagcgggatgctggcgaaagctattgccttgcatggtaatagcgttggtacgggcggagattactctaccggtgctgcgcaggtgatcctgccgcgcgtagtcggtagcatggaagtgtatgaacagcaaacctcctggccgctggtattgcagaacagcaaaaccattgtgctgtggggctccgatttgctgaaaaaccagcaagcgaactggtggtgcccggatcacgatgtttatgaatattacgcgcagctaaaagcgaaagtcgccgccggtgaaattgaggtcatcagcatcgatccggttgtcacatccacccatgagtatctggggcgcgagcatgtgaagcacattgcggttaacccgcaaactgacgtgccgctgcaactggcgctggcacatacgctgtacagtgaaaacctgtacgacaaaaacttccttgctaactactgtgtgggttttgagcagttcctgccgtatctgctgggtgagaaagacggtcagccgaaagatgccgcatgggctgaaaaactgaccggcattgatgccgaaaccattcgtgggctggcgcggcagatggcggcgaacagaacgcaaattattgctggctggtgcgtgcagcgtatgcagcacggtgaacagtgggcgtggatgattgtggttctggcggcgatgctggggcaaattggcctgccaggtggtggttttggttttggctggcactacaacggcgcaggcacgccggggcgtaaaggcgttattctgagtggtttctccggctctacgagcattccgcctgttcacgacaacagtgactacaaaggctacagcagcactattccgattgcccgttttatcgatgcgatcctcgaaccggggaaagtgatcaactggaacggtaaaagcgtaaaactgccgccgctgaaaatgtgtatttttgccggaactaacccattccatcgccatcagcagatcaaccgcattattgaaggcttgcgcaagctggaaacggttatcgccatagataaccagtggaccagtacctgccgctttgccgatatcgtactgcctgcgaccacgcagtttgagcgtaacgatctcgaccagtacggcaatcactccaaccgtggcattatcgccatgaaacaggtggtgccgccgcagttcgaggcgcgcaacgacttcgatattttccgcgagctgtgccgtcgctttaatcgcgaagaagcctttaccgaagggctggacgaaatgggctggctgaaacgcatctggcaggaaggtgtacagcaaggcaaaggacgcggcgttcatctgccagcgtttgatgacttctggaataacaaagagtacgtcgagtttgaccatccgcagatgtttgttcgccaccaggcattccgcgaagatccggatctcgaaccgctgggcacgccgagtggcctgattgagatctacagcaaaactatcgccgatatgaactacgacgattgtcaggggcatccgatgtggtttgagaaaatcgaacgctcccacggtgggcctggcagccaaaagtatccgttgcatctgcaatctgtgcatccggatttccgacttcacagccagttatgtgagagcgaaacgctgcgtcagcaatatacggtagcgggtaaagagccagtattcattaacccgcaggatgccagcgcgcgcggtattcgtaacggtgatgtggtacgcgtctttaacgctcgcggtcaggtgttggcaggggcagtggtttctgaccgctatgcacccggcgtggcacgaattcacgaaggggcatggtacgatccagataaaggcggcgagcctggtgcgctgtgcaaatacggtaaccccaacgtgttgaccatcgacatcggtacaagccagctggcgcaggcgaccagtgcgcacactacgctggtggaaattgagaagtacaacggaacagtggagcaggtgacggcgtttaacggccccgtggagatggtggcgcagtgcgaatatgttcccgcgagccaggtgaaaagttgaattaacccgcgtcgcaggtgaaatcatgaccacgctgacagcacaacagattgcctgtgtttacgcctggctagcgcagttgttctcccgtgagctggacgatgaacaactgacgcaaatcgccagtgcgcagatggctgaatggtttagcttgctgaaaagcgaaccgccgctcactgcggcggtgaacgagctggaaaaccgtattgccacgctgacagtacgtgacgatgcccgtctggaactggccgcggacttttgcggcctgtttctgatgaccgacaaacaagcggcgctgccgtatgcaagcgcctacaaacaggacgagcaagagattaaacgcttgttagttgaggcagggatggaaaccagcggcaatttcaacgaaccggcagatcatctggcgatctatctcgaattgctcagccatctgcattttagcctgggagaggggaccgttcctgcgcgaagaatcgacagtttgcggcaaaaaacactgacggcgctgtggcaatggttaccagagtttgttgcgcgttgtcgtcagtatgacagctttggtttttacgcggcactaagccagttattgctggtgttagtggagtgcgaccaccaaaacagataacgtcgtttgtgcgcctgaaaagacgcgtttagcgtcgcatcaggcattatggcgcagttgccggatgcggcgtgaacgtcttatccggcccacaggaactgtaatctttgtagaccggttaagatgcgtcatcgcatccggcaaacacacatcacggatgagctacaaaccgggaaagccgctggcgcagcaggcggttttcctgcttcaggtgcgcaatatcatccattaacgtcagcgccaccgcgatccccggccagtccagagccagttcatgacgcaggcgtaccgcgcgttgcaccacaatggcggcatggtcgtcaaatacccaggttgtttcctggatctcacgcggttcaaccacccccaaaccgacaatttcattcaactcctcttcagagatgccggtatgcaggcaaaattcggtaatagtaaaagtcaccgtaacattagccattatgctttcccccaatctttacgtggatcaaaagagctctgggcgtctgccagttgctgccacagcgcggcagtgttttcatccggtttcggcggcatcacgattttcagtaccgcatacagatcgccggtctgttttttgctcaccagacctttgcctttaacgcgcaatcgttgcccggcctggctgcctggcgggatagtcagcaaaatgctttctttcagtgttggaacggtgactttagcacccagcgccgcttcccacgggctaaccggcaccacaatttccagatcctggccgacaatatcaaacagcggatgtggcgcaatatgaatcaccagccacaaatcgccatttggaccgccgttttcgcccggcgtcccctggcctttcagacggatgcgttgaccattgccgacgcccgccgggatcttcacattcagcgttttcggaatttcctgttcgatcatgccaaaggcgttataaaccggcaggttatagctgatggtacgcttatgctcagtaagcgtttcttcgaggaataccgccacttcgatttcaatatcgtggccgcgtgtggcggggcgttgacggctctggcgggcatgctgaccgaaaatactgctgaagatatcgtcaaaatcttcggcgttaaaactctgaccgtcgccatggtggaactgacggttaaattgcggatcgttgcgatgttgccacatctgatcatactcagcgcgacgttgttcatcacttaacacttcccaggcttcagcgacctctttgaagcgggcttcggcatccggttctttgctgacatcaggatggtatttgcgggcaagtcgacgataggcggtcttgattgtcttgagatcgtccgtcggtttcacgcccatgatggcgtaataatcctttaattccatagcgttatctcgcgtaaatcaacacaaattgaaggaacccctgtaaggtaactcctataagtgtagggtaatcctcaaaatttcatatgccaacacagaatatgttattgaaatcatcgcggagaggaggtcgccatcaagatgggttgctgaacatattttaaacaggtgaaaaagggtgagcgatttttgatagttgaaccaggcactttaagtttaactagggcgtcattatttattaaattttatagacgctatatatgggtagtaatatacatggaattagttgcactgcaaataattatttgaaacaggcctggaacgatataaaaaatgagtacgaaaaaaatcaaacatatagtatcacgctttttgaaaacacactggtgtgttttatgcggttatacaatgaactcagacgtaaagtaaatgaagaggatactccatgtctggaatgtgaaagtctagaaaaagaatttgaggaaatgcagaatgataatgatctaagtttatttatgagaatattgcgtactaatgatacacaaatttatagtggggttagtggaggtattacatatactatacaatatgttcgagatattgatattgttagagtgtccttgccgggcagagctagtgagtctatcacagattttaaaggttattattggtataactttatggagtatattgaaaacattaatgcgtgtgatgatgttttttctgagtattgttttgatgatgaaaatataagtgtccagccagagcggataaatacgccgggaatatctgatttggattctgacattgatttgtctggtatatcttttattcagcgtgaaactaaccaggcattaggattaaaatatgctcctgtagatggcgatggatattgtctgttaagagctatactggttttaaaacaacatgattatagttgggcgctggtcagttataagatgcaaaaggaagtttacaacgaattcattaaaatggttgataaaaaaacgatcgaggctcttgttgatacggcattctataatctcagggaagatgtaaagacgttatttggcgttgatctacaatctgacaaccaaattcaggggcagagtagtcttatgagttggagctttctgttttttaaaaaacaattcattgatagttgcttgaataacgaaaaatgtatcctgcatttacccgagtttatatttaatgataacaagaacttgcttgctttagataccgacacgagcgataggattaaagcggtgaagaattttcttgttgttcttagtgatagcatttgcagtttatttattgttaatagtaatgtggcaagtatctccttggggaatgaatcctttagtacagatgaagatcttgagtatggttatttaatgaacactggcaatcattatgacgtttacctccctcctgaactttttgctcaggcttacaagttaaacaataaggaaatgaatgcgcaactcgactatttaaatcgttatgcaatttaatggcaaaggcatatgctaaaaaccattgttattagtctcacacttttttattggtaaatattgtctctgtattggtaacgccgcagatattctgtttagccacaggtgcaattatcagcggcgtacgcgaggcaggggctaatcaggcatagtttgcgtcaaaccttgcctgtttttgaagatgtatatagaaaaacaggcgttcaacaagccattttgcgaacctgttcccggaaaaaagtcatatttctgtcacactctttagtgattgataacaaaagaggtgccaggaatgaacaaaacgctaatcgccgcagctgtggcagggatagttttactcgctagtaacgctcaggcacaaaccgtaccggaaggctatcagctacagcaagtgctcatgatgagccgccataacttacgtgcgccgctggcgaacaatggcagtgtgctggagcagagcacgccgaataaatggccagaatgggacgtccccggtgggcaactcaccaccaaaggtggcgtgctcgaagtgtatatgggccattacatgcgtgaatggctggcagagcaggggatggtgaaaagcggggaatgcccgccgccgtacaccgtttatgcctatgccaatagtctgcaacgtaccgttgcgaccgcacagttctttattaccggcgcattcccggggtgtgatattcctgtgcatcaccaggaaaaaatgggcactatggacccaacctttaacccggtgatcaccgatgattccgccgcattcagtgaacaggcggtggcggcaatggagaaagagctcagcaaactccagcttaccgacagctaccagctactggaaaaaatcgttaactataaagattcccctgcctgtaaagagaaacaacagtgtagcctggtggatggcaaaaatacctttagcgccaagtatcaacaagaaccaggtgtttccgggccgctgaaagtcggcaacagcctggtagatgcgtttactttgcaatattacgaaggttttccgatggatcaggtggcctggggagaaatcaaatctgaccagcagtggaaggtgttgagcaagcttaaaaacggctaccaggacagcctgtttaccagtccggaagtggcgcgcaatgttgcgaaaccgctggtcagttatatcgacaaagctctggtcaccgatcgcaccagcgcaccgaaaattacagtgttggttgggcacgactccaacattgcctctctgttaacggcgctggatttcaaaccgtatcagttgcatgaccagaacgaacgcacgccgattggcggcaaaatcgttttccagcgttggcatgacagcaaagccaatcgcgatttgatgaaaattgaatatgtgtatcagagtgcggaacagttacgtaatgccgatgcgttaaccctgcaggcacctgcgcagcgtgtgacgctggaattaagcggttgcccgatagacgctgatggtttctgcccgatggataagtttgatagcgtgttgaatgaagcggtgaaataacagaaaactcccccgcgagaagcgggggagtcgctggttaaacgtttttacgttcgatggtctgttcgccccaaaaaaggctatctttatcggtcttagcaaaggctttgactaacacttcatcactaccttcttcccaaatcttttccgccattttttcgtcgtacccggcgacttcgaaaatggcctcggctatttccgggctcgtattgcgcagagatgcccattcaccgacgtgatgagctttcgcttcttgagttggcatgcgtatcctcctgttgaagattagccgttaagtttaactgccagacctgcgacatattccccttgataacgagcaatagacagttcttcctggctgggctggcgactaccgtcaccgcctgcgatggtggttgcgccgtacggcgtaccgccgcgaacctgactaacgtcaaataattcctgcgctgcgtagccaatagggacaattaccatgccgtgatgcgcaagggtcgtccaggtggatgtgatggtttgttcctgaccgccgccagtaccggtggaactaaagacgctcgccagttttccgtatagtgcgccggaagcccacaggccgcccgtctggtcgaggaaggtacgcatttgaccggacatgttgccaaagcgggtaggtgtaccaaaaataatggcgtcgtaatcggccagttcttgcggggttgcaaccggtgcagtttgcgttttaccgcctgctttttcaaataattgcggcggcatggtttccggtacacgcttaacgacaacttcagcgccatccactttgcttgcaccctcagcgactgcgcgtgccatcgtttcaatatgtccgtacatggaataataaagcaccagaactttagccatttctaaccactcctcgtgttatctctattccgtagcgattcgctaccacttatttaaagataagacgtccttttcagagtgcaaatttcacaaccacttatttgatttataacaactttcacaagcacgtaattttgtcgcaaaatgacacatttttatctcatcgcgtttttttaatcataagagcggcttatggataattattggagatgatatctattctcgctaagaagctgttgcaggatattaccaaacgcgggtctgcccgcgtcagttcactaagcttagtcccacgtagcgaaaatatggcagccgccatacgccgcgttaattctatgcaatatgatgtctatacccagacggaggtcagtaatggcaaaccatcgaggcggttccggcaattttgcagaagaccgcgaaagagcaagtgaagcaggtaaaaaaggtggacagcacagcgggggtaatttcaagaatgacccgcagcgcgcatctgaagcaggtaaaaaaggtggtaagagcagtcacggcaaaagcgacaactaaccgggctaatcaatgacgaatgcatttttgtctgtagctcgtcaaaaagccatcaccgccggttacccggtggttgatactgatgacaaatgtaagcttgcctgatgcgcgatgcttatcaggcctaccagaagattgcaatatattgaatttgcactgttttgtaggccggataaggcgtttacgccgcatccggcatgaacaatgcgtacgttgtcaacaatctgcaccgccggtaaccccggcggttttctgtttatggctcctgatgaacaacttctggcggtggaacgtcaaccaactttctgcttaacaacgcattgagtaaaatcgcgccaaaggttgctgtaccaatccctcccaacgtaaaaccgcccagcgtgagagcaaaatcacccgcgcccagcactaaggttactgcgaccataatcaaattaccgttctggcttaaatcgacacggttttgtacccatatccttgcgcctgcgacggcaatcagcccgaacacaacaatacttgcaccaccaataaccgcggccggaatggtatgaatcagcgcaccaaatttcggactaaagcccaacagcatggcgatgacggcagcagcaacaaacaccagcgtgctgtagactttggtcacggccatcacaccgatattttcagcataggtggtcacgccgctaccgccgacagagccggaaagcatcgttgccagaccatcgcctacgaatgcccgccccatatacgggtccatattgcgtccggtcatcccggcgactgccttgagatgacctaagttttccgccaccagaatcaccgccacgggcgcaatcagcatcattgcctgaccattaaaagcaggagtggaaaaatgtggcagaccgaaccaggcagcatggctgacgagagtaaaatcgacggcttttcccagccctaaaacgttggtcatcacgccatacagcagacaggcgacaattaatcctacgagaatcaataaccgctggatcatgccacgggtaaacaccgccaccagcccaatacacagcaccgtcattaccgccatccagctatcaaaggcgctagcgcttacacttttcactgcgataggcgctaagttcaggccaatcgccatcaccaccgcacccgtcaccaccggcggcatcagtcgttcaatccagcgcgtaccgattttcatcaccaccaggccaatgacggtataaaccagcccacaggcgataatcccgcccagcgcaatgctgatattcgggttaatgccctgaccgttaaagcccgtcgcggcgatcaccacgccgacaaaagccgcgctggagccgagataactggggacgcgcccgccggtaataaagaaaaacagtaacgtgccgatcccgctcattaaaatggaaagattgggatccagccccatcagaatcggcattaacaccgtcgcgccaaacatcgccaccgcgtgttgaacgcccattactgccgtctgagcaaacggcaatcgttcatccggcgcgaccacgccgctctctgtagaggtgctttttaactgccagtgaggaaaaccgaacattgccatcagctgtctccttaaggaggttaacaagcagggcgcatcagcgcgtgataactgcgatcgaaccacaccagcccgtagggtgtggtgtgacgatgaatcgcttcgatggcgcaaaacagaatgtcgtgggtgccgacgctcaccacctggctgatacggcagtcaaagctaaccagagcctcttccagttgcgggcatccggtcacccccgtctgccagcgggcggcggcaaagcggtgttccatgggcgttttgccgccaaaaaggttactaagcggctcctgcccggcgctaagtgtatttacacacagcgttcgattttcattgaatgccggccagacggacgccccacgattcaggcacaccagtaatgtgggcggcgtatcggtcacactgcagacggcgctggcggtgaacccggcgcgcccggctggaccgtccgtggtgataatattgaccgccgcgcccatgcaggacatcgcatcgcgaaaagtttgttgatcgacaatgttcatagtttgctccttacaacagcccgcaggcttcttcaaaggacagacgtggcaggcgcgcataaagcttgctgctatcgccatagccgatattaatcagcagattgctcttcagcgtgctgcccgtaaaaaaggcgtcgtccacgtgttgacggtcaaagccgctcatcgggccggtatccagtcccagcgcccggcaggcgacgatcagataggccgcctgcatggaactgttgcgaaacgctgtttcttcggcaagttgtgggctggaggtaaaccaactgcgggcatcaccgtggggaaacagtagtggtaaccgttcataaaattcactgtcccaggcgacgatagcggtgacgggcgcggtcagggttttttgcagattgccgctggaaagtgccgggcgcagacgttcttttccttctgccgtgcgggtaaacacgatccgtgccggagaacagttagcacttgtcggcccccatttcatcagggcataaatctcccgtaacgtctcatcgctgacgggtgtctcccgccagccgttgtgagtgcgggcatcggtgaacagggtgctaagcgcacctgggctaacggcttcgttcatagcaattccttacagggcggcttcacggtgatgtaacaggctggcaagcccgttgagtaacagagcattaaacgtttcgggatcggtcacgttgcaggcgtgtccgccatagggcatcaccattttctggctatcgggcagggcggcatgaagttcactggaacatgctgttggcaccagcagatcatcactggcgcagatgatttgcaccgggcagcggatgcgatccgcatggtgactaaagtcagcgcgtttgagggcgttaagtcgacgcagtaaattatttttgccctgaaaatgcgccagtgccagcgcgtcttctgcctccaggcgaggtgcgcgggccgccatccagtcggcgggatagaggaacaacggctgcgcttccacccatgcctgcgcgccgccgctatacagtaatcgttcgcgaacctgaaaacagcggcgcgtatgggcgtttattcgtagccagccgttaacgctgatcagcacagttacgctcgcgggataatccagcgccagctgcattcccaccagcgcaccgagcgcatggccgaccactgcgtaatgctcaatccctgcggctaccagcgcctgatgcagttccgctgccatctgggcgatactgtaatcttctgccagcgtgtcgggattattgccggtgccgcgctggtcgtaacagactacctgatactcctgctccagcaccgccagttgcggtaaccagtaactgccgctacccccaagaccgctaatcaacaccactacgggcgcatcagcataagggggaggactgagactaagtttcatcgcggcctcacttggcgatatgcgcaattgtggcgatttccaccagcgcgtcaggttttaccagtccgcactgaatgcagaatcgcgccggtttatcacccggaaaaaactcggcgtagatttcgttaatcgcggcgtaatttttccagtcggtaataaagatgctgttgaaggtcacatccgccatcgtgccacccgccgtctcgatcaccttgcggatagtttccagaacgtggcgggtttgcgcctttgggtcatcggcaaacagcacgttattatgttgatcaaaagccagcgtaccggagacatacaccacgccatcagccagcgtgccgggaacgaagggggccagcggtgcgctgctgccagcgggaataattacggattttggcatcgttaaactccttaagcgatatgagcaaaggacgtgggagaaagcgcgtcgcagaatgtttcgacgtcgctgacccagccaaaaaaggtttcgatattgaacaacgcggctttctgcgcaaatttcggccccgcctggtgagttgcgtcttcaagcaccacgccgaaatactccagaaaaaagccgtcgcgtagcgtgctttcgacgcagacgttggtagcgatgccggtgaaaaccagatggcgtattccgcggctgcgcaaaatgctgtccagcggcgtattgaagaaaccgctgtagcgcggcttcggcagcacaatatcgccaggctgcggcaccagttcatccaccagttgataatcccaggagcctttcgccagcaatttcccctgcagctgcggctgcttacgcatggttttcagggcgttgcttttatgaaaattcggactgccgggtccgccagcctcgacatactgttcatcccagccattttgaaaccagatgatcagcatccctgccgctcgcgctgcggtcacggcggtttgaatgttggcaatgaccgggcgagtggtactgacatcaaacccggcgagatctaagtagccgcctggcgtggcataagcgttttgcatatccaccacgatcagcgcactttgctgcggatcgaaggtaatggcttccggtcgagcggttaaggtcgtcatcatgccacctcctgagtcagcgcaggtagatgggcgcggcattgcatcagtggttgaatgcgctcgccgaaggtttcgattccgctcagaaaatcgtcgaaggttaacagcacgccttcggcaccaggcacgcttgcgacttcatctaacatgcgcgcgacactggcgtaagaaccgactaacgtccccatattgatgtttaccgcgctagtgggatcggccatctgacgaacgttggtgtcagtaccggagcgggtatctttctgactttgttcggttagccagcttaacgcctcttcatccgcgcccgctttgtagtgttcccatttggcgcgagcggcatcgtcggtttcatcggcaatcaccataaacaacacataagagccaacgtcgcgtccggtttgctctgcggcctgtttcatccgcgcagcggtcggggcgaaagccgtgggtgtatttacgcctttgccgaaacagaagttgaaatcggcataccgggcggagaacgccatgccagcgtcgctttgcccggcgcagatcactttcatggggacactcggttgcggactcacgcgacaatcattcatggtgaaaaaatcgcctttaaaatcgcttttccccgtgccccacaggtcgcgcagcacctgaacatattcggtgagatagtcgtaacgacgggagaaatagtcatcgccaggccagatacccatctgctcatactcgggcttttgccagccagtcacgaggttgacgccaaaacgcccgccagagatggagtcgatggttgcggccatacgggcgacgattgccggaggtaacgttaaggtggcagcagtggcgtaaatctgaatgcggctggtcacggccgccagccccgccatcaaggtgaagctctcaaggttgtgatcccagaactcagttttgccgccaaagccacgcagtttgatcatgctcagggcgaaatcgaaatggtagtgctccgctttttgcacaatggctttattcagttcaaaggtcggcatgtactgcggcgcgtgggtgctaatgagccagccgttgttgccaataggtacgaatacgccaattttcatcatcaacctctcttcgtctcgtaaagtgaaagtcagacggggcgctgcatcctgcatatccttttcagccgcgtattggcttgtttgcaaagcggatgccagtttttaaaaagttaatgttattaatctgttaacattacgttatctaaaatatctggtaaaaagtggactaaacggtcaaaacagttgcacataaaacatgcatctgtgcgcgatgagagtgcagaaggtcgaggccgggcgggggttttgctatcctgttgccaatctacaagaggggagagcgcatgacgcaaggcgcagtgaaaacaacgggtaaacgtagccgcgcagtaagcgcgaagaaaaaagcgattcttagcgcagcactggacacttttagtcaattcggttttcacggcacaaggctggagcagatcgcagagttggcgggtgttagtaaaaccaatctgctgtattactttccgagtaaagaggcgctgtatattgccgtgctgcggcagattctcgatatctggctggcaccgttaaaagcgtttcgtgaagatttcgccccgctggcggcgatcaaagagtacatccgtctgaagctggaagtcagtcgcgattatccgcaggctagccgcctgttctgtatggagatgctggcaggcgcgccgctgttaatggatgaactgacgggcgatttgaaggcattaattgatgagaaaagcgcgctgattgccggttgggtcaaaagcggcaaactcgcgccgattgatccgcagcatttgatttttatgatttgggcttccactcaacattacgccgatttcgcccctcaggtggaggcggtgacaggcgcgacgttgcgcgatgaggtatttttcaatcaaacggttgaaaacgtgcagcggattattattgaggggattcgaccacgttaaagatgccggaggaggttgtaacatcctccggctacctgtttaacctatagtcattaagctggcgttaccgccagcggcagcggtattcacactcaggctacgctcgatatacagccgttccagaaggatattgctttcgccacgggcaaaaccctgcacgctaacaattgtgccatcccgcgcggcaactgcttcacacaatgcgcgaagctgatcgctatcaccgtggaagatcaccgcatcaaacggttgagcggttatattttccgctttcgccagttgaatacgttcgctgactgcgcttggcaatgccttcactaactgacgatgcagcgcgtcatccggccacagtacctggctgcccaccgccagcacggcggcgagctgagtcagcgcatcctgctcatcatcggcaatacacaacacgcgctcacgcggcagcagcgtccaggtgttgcgttcacccgtcggccccggcagcaatcgttgtgttcctgcctgcgccagctcgccatattgcgtacataacgcctgcaattctggacgatttgctgcccattcccgcagtgcatttagcggctgagtcaatgcggctttcaactgcgcatcgaccggatactttgcatcctgacgcgcgagcgtcactgccagcgcactttccgggcgattcgccagcagacggtagagatagagcggaccgcctgctttcggcccggtaccggacaacccttcgccgccgaacggctgcacaccaaccactgcgcccaccatattacggttaacatacaggttaccaacatgggcgctgccagtgacctgggcgatggtttcatcaatgcgcgtatggacgccaagcgtcagaccataaccggaagcgttaatctgctcgatcagctctggtagctggttacggttgtaacgcaccacatgcagcaccggaccaaagacctctttttgcaattcggcaaagtcatccagttcgatcagcgtcggggcgacaaaggtgccgctttgccattcacgggcatcttcgctgttttcccgcaccgcctggaacaccggacggcctttgctacgcatggtctgaatatggcgctcaatattggctttcgcttcgctatcaatcactggaccgatatcggtggtcaggcgacccggattacccatccggcattcggccattgcgccgcgcagcattttcaacgtgtggtcggcaatctcatcttgcaggcacagcacgcgcagcgcgctacaacgctgacccgcactgtcgaacgcgctggccagtacatccacgacgacctgttcggtcagtgcactagaatcgacaatcatcgcgttcatgccgccggtttcagcgatgagcggaatagggcgaccctgagcgtccaggcggctggcgatattgcgctgcagtaacgtagcgacttcggtactaccggtaaacatcaccccgcgcacgcgatcatcacccgtcagttgcgcgcccacggtttcaccccgacctggcagcaattgcaccacgcctggcggtacacccgcttccagcaaaatggcgatcccttgcgcggcaatcagcggcgtttgttctgccggttttgccagcacgctgttacctgccgccagtgcggcggcgatctgcccggtgaaaatagccagcgggaagttccacggactgatacacaccacaggccctaatggacggtgggtttcgttagcgaaatcatcccgcacctgtccggcgtagtagtggagaaaatcgaccgcttcgcgcacttcggcaatggcgttactgaaggtttttccggcctcacgcaccagaataccaatcagttgctgcatctggctttccatcagcacggcagcgcggtgcaaaatcgctgcgcgttcagccggaggcgtggcaaaccagattggcgcgttattaaccgcactttccagcgcctgttctacttcacgcggcgtggcttcacgcacatagcccacaatatctttcggttccgcagggttaataacggggctcatctcacctgccgctaccggttgttccagcattggcaaggcctgccatttttgcagtgcactattgagcagggcagaggagaggctggccaggcggtgttcgttagcgagatccagccctgcgctgttgtcgcgcccgtgaccgtaaagatcgcgcggcaggggaattttcggatgcggtaatccagtttgcccttcctgttgcgccagtttttctacagcagtgaccggatcggcgaccagttcatccagtggcaaagaggtgtcggcaatacggttaacaaagctggtgttagcaccgttttccagcaggcgacgcaccagatacgccaacagcgtttcatgtgtgccaaccggagcataaatacgacacggacggttaagtttgccgtcggcaactttcccggggacctgctcatacagtggctcgcccataccatgcaggcactggaactcgtactgacccgggtagtagttctgccccgccagttgataaatcgccgccagcgtatgggcgttgtgcgtcgcgaactgcgggtagattagattcggcaccgccagcagctttttcgcacaggcgagataagaaacgtcggtatacaccttgcgggtataaaccggataaccttcaaggccgtccatctgcgcacgcttaatttcactatcccagtacgcgcctttcaccaggcgaatcatcagacggcgacggctgcgggtggcgagatcaatcaggtaatcgatcaccaacgggcagcgtttttgataagcctgaataacaaaaccgatgccgttccagcctgccagttccggctcgaaacagagtttttccagcagatcgagggagatctccaggcgatcggactcttcggcgtcaatgttgataccaatatcgtactgacgcgccagcagggtgagacttttcagacgcgggtaaagctcttccattacccggtcatactgggcgcggctataacgcggatgcagcgcgctcagtttgatactaatgcccggcccttcatagatgccacgaccgttagacgctttaccgatggcgtgaatcgcctgctgataggaaaccatatacgcctgtgcatctgcggcggtcagcgcggcttcgcccagcatatcgtaagagtaacggaaacctttctcttccagcttgcgggcattggctaacgcttccgcgatggtttcgccagtgacgaactgctcacccatcaggcgcatcgccatatccacacctttgcggatcagcggttcaccgcttttaccgataatgcggttcaggctgcgggagaggctggcttcgttatgggtggaaaccagtttgccagtaaacagcagcccccaggtggcggcattaacaaacagactcgggctacgaccaatgtgactctgccagttaccgttgctgattttgtcgcgaattaacgcgtcgcgggtggctttgtcgggaatacgcaacaacgcttccgccagacacatcagcgccacgccttcctggctactcaggctaaactcctgcaataacccctggaccatacctgcgcgaccactggcatttttttgattacgcagtttatcggccagctgatacgccagtttgtgcgcctgttcagcaactggctgcggcaggcgggcttgttccagcagcatagaaaccgcttcggtttccgggcggcgataggccgcggtgatcgcggcgcgggaaacgctctggggcaatatttgctcggcaaagtcgaggaatggctggtgtggttcctctgccggagtcggtgcttcatcgctctcattggccgcgccagaaagcagcgcaggtagctccggcagagtatcgctgttttccagttgttcgagataagaaaaaatcgcctgcttaattaaccagtgtggtgtgcgatcgatacgtgtcgcggcagacttaatacgctcacgcgtcgcgtcgtccagcttaacccccatggtggtggttcccatgccattactcctgttgttcagaaaggtgcaacttaacgttatcgtgaaatatccatgatgttgcaactttgtgcaaccatgttaaatgtgacatgcgtagcaagcttaaaaatgaatgaaatgttaataaaagaaatcgatatgacagggattaaaaaaataactcagactttttctctgcggcagttaacatttttgaaaggtgcaaccgcaaaaaatgtgagagagtgcaacctgatgaaaaatagtgtcgctgagcactaaaatttaatgtaaatggtgtgttaaatcgattgtgaataaccagcgcttccggcaggatacggtcgccctggtaaaacataaactctgttaccccgttccggtggcagatataacggcaagtttcgacattgccgataataattttttggagactttagatggctattagcacaccgatgttggtgacattttgtgtctatatctttggcatgatattgattgggtttatcgcctggcgaagtacgaaaaactttgacgactatattctgggcggtcgtagtcttgggccattcgtgacggcattaagcgcgggtgcgagcgatatgagcggctggctgttaatggggttgccgggcgctgtttttctttccgggatttccgaaagctggatcgccattggcctgacattaggcgcgtggattaactggaagctggtggccgggcggttgcgtgtgcataccgaatacaacaataacgccttaacactgccggattatttcaccgggcgctttgaagataaaagccgcattttgcgcattatctctgcgctggttattttgctgttcttcaccatttattgcgctagcggcattgtggcaggcgcgcgtctgtttgaaagtacctttggcatgagctacgaaacggctctgtgggcgggcgctgcggcgacgatcctttacacctttattggcggtttcctcgcggtgagctggactgacactgtacaggccagcctgatgatttttgccctgatcctgacgccggttatcgtcattatcagtgtcggtggctttggtgacagcctggaagtgatcaaacaaaagagcatcgaaaacgttgatatgctcaaaggtctgaactttgttgccattatcagtctgatgggttgggggctgggttacttcgggcagccgcacattctggcgcgttttatggcggcggattctcaccacagcattgtccatgcgcgtcgtattagtatgacctggatgatcctctgcctggcaggggcggtggctgtcggcttctttgggattgcttactttaacgatcatccggcgttggctggtgcggtaaatcagaacgccgagcgtgtgtttatcgaactggcgcaaattctgtttaacccgtggattgccgggattctgctgagcgcaattctggcggcggtaatgagtaccttaagttgccagctgctggtgtgctccagtgcgattaccgaagatttgtacaaagcgtttctgcgtaaacatgccagccagaaagagctggtgtgggtagggcgtgtgatggtgctggtggtggcgctggtggcgattgcgctggcggcaaacccggaaaaccgcgtgctgggcttagtgagctacgcgtgggcaggctttggcgcggcgtttggtccagtggtgctgttcagcgtgatgtggagtcgcatgacgcgtaacggtgcgctggcggggatgatcatcggtgcgctgacggttatcgtctggaaacagttcggctggctgggactgtacgaaattattccgggctttatcttcggcagtattgggattgtagtgtttagtttgctgggtaaagcgccgagtgcggcgatgcaaaaacgctttgccgaggccgatgcgcactatcatagcgctccgccgagtcggttgcaggaaagctaagggacttagcctgcggcggttttgtttggcttcagcagcgggttgcgctcccttaatgtgcctcgccatataaattgaatggtgcagggagcgcgcagggggcggccaatcgccgccgccccctgctgtcccggccttcggggaacgcttcagcgattttgacgccaccaacacccgagctgttattatgttccgggcaaaaagttagatttgataatcgcggatggacgaaattgcttgatacacccgcttatcagttttacatggaagctctgatgcattgagtctggacagttttgtcggctggatacggcgtttacgcggcatccggcaagaacacatggttctttgcaaacaatcccatctttctaccctggaataatcgtttatatcccttggcattacctctctttgtttacattccaacatcattttataaacattccgcttgtgtttttctttgccgtaatgataatcgctatcactgcgatttacttttctttgcatagattgactcagaaaaacgtttaagggtgggtggcatgtttgttccgtttctcattatgttgcgcgaaggacttgaagccgcgctgattgtcagtttgattgccagctatcttaagcgtacccagcgaggccgatggattgtgtgatgtggattggcgtgttgcttgccgctgcgttgtgcctgggcttgggtatcttcattaacgaaaccaccggcgaatttccgcaaaaagaacaggaactgtttgaaggtatcgtggcggtgatcgccgtggtgatccttacctggatggttttctggatgcgcaaagtgtcgcgcaacgtcaaagtgcaactggaacaggcagtcgatagcgcattgcagcgtggaaatcatcatggctgggcgctggtgatgatggtcttttttgccgttgcaagggaagggctggagtcggtctttttcctgctggcggcatttcaacaagatgtcgggatctggccgccgctgggtgcaatgctcggtcttgctactgccgtggtgctaggcttcctgctctactggggcggtattcgcctcaatcttggtgcattttttaaatggaccagcctgtttattctcttcgtcgccgcagggctggcagctggtgccattcgcgcatttcatgaagccggattgtggaaccactttcaggaaatcgccttcgatatgagtgcggtgctctcaactcactcgctgtttggcacgctgatggaagggatttttggctatcaggaagcgccgagcgtcagcgaagtcgccgtctggtttatttatctcatcccggcgctggtggcatttgctctgccaccacgcgcaggggcgacagcgtctcgctccgcgtaacaaatacgacgcaaactcttgcttagttacaacatactttaaagggatagtctcgtcatgaccattaacttccgccgtaacgcattgcagttgagcgtggctgcgctgttttcttctgcttttatggctaacgccgctgatgtgccgcaggtcaaagtgaccgtgacggataagcagtgcgaaccgatgaccattacggttaacgccgggaaaacacagttcattattcagaaccacagccagaaggcgctggagtgggagatcctcaaaggcgtgatggtggtggaagagcgggaaaatatcgcccctggctttagccagaaaatgacggcgaatttacagcctggcgaatacgatatgacctgcggtctgctgactaacccgaaagggaagttgatcgtcaaaggtgaggcaacggcggatgcggcgcaaagtgatgcgctgttaagtcttggtggtgcaattactgcatataaagcgtatgtcatggcggaaaccacgcagctggtgaccgacaccaaagcctttaccgacgcgattaaagcaggcgatatcgaaaaagcgaaagcactgtatgcaccgacgcgccagcactatgagcgtattgaaccgattgctgaactgttctccgatctggatggcagcattgacgcccgtgaagatgattacgagcaaaaagccgccgacccaaaattcactggtttccaccgtctggaaaaagcattgtttggcgacaacaccaccaaagggatggatcagtacgctgagcagctttataccgatgtggtcgatttgcaaaaacgcatcagtgaactggctttcccacctagtaaagtggtcggcggcgcagccggactgattgaggaagtggcagccagcaaaattagcggtgaagaagatcgctacagccacaccgatctgtgggatttccaggctaacgttgaaggcagccagaaaattgtcgatttgctgcgtccacaactgcaaaaagccaacccggaactgctggcaaaagtcgatgccaactttaaaaaggtcgataccattctggcgaaataccgtactaaagacggttttgaaacctacgacaaattgaccgatgccgaccggaatgcactgaaaggaccgattactgcgctggcggaagatctggcgcaacttcgcggtgtgctgggactggattaagcgttatgcagtataaagatgaaaacggcgtgaatgaaccgagtcgccgacgtttactgaaagtgataggtgcactggcgctggcgggaagttgtccggtcgctcatgcacaaaaaacgcaaagtgcgccgggtacgcttagtccggatgctcgcaatgagaaacagccgttttatggtgagcatcaggcagggatcctgacgccacaacaggccgcaatgatgctggtggcgtttgatgtgcttgccagcgataaagccgatcttgagcggttgtttcgcttgttgactcagcgttttgcttttctgactcagggcggagcagcaccagaaacgccaaatccgcgcctgccaccactcgattccggcattcttggcggctacattgcgcccgataatctcaccatcacgttaagcgtgggtcacagtttgtttgatgagcgctttggccttgcgccacagatgccaaaaaagctgcagaagatgacgcgtttccccaacgacagcctggatgcggcgttatgtcatggtgatgtgttgctacagatttgcgccaacacccaggacacggttatccatgcgctgcgcgatatcatcaaacacacgccggatttgctcagtgtgcgctggaagcgggaagggtttatttccgatcacgcggcgcgtagtaaaggcaaagagacgccgattaatttgctgggtttcaaagacggcactgccaatcccgatagccagaatgataagttgatgcaaaaagtggtgtgggtaacggcagatcagcaggagcctgcgtggacaatcggtggcagctatcaggcagtacgcttgattcagtttcgagtggaattttgggacagaacgccgctgaaagaacagcagacgatttttggccgtgataagcaaaccggtgcgccgctgggaatgcagcatgagcatgatgtgcctgattacgccagcgacccggaagggaaggtgatcgcgctggacagccatatccggctggcgaatccccgcacggcggagagtgagtccagcctgatgctgcgtcgtggctacagttatagtctgggcgtcaccaactccgggcaactggatatggggttgctgtttgtctgctaccaacacgatctggaaaaaggcttcctgacagtacaaaaaaggctcaatggcgaagcgctggaggaatacgttaaacctatcggcggcggttatttttttgcgctgccgggggtgaaggacgcgaacgattatttcggaagcgcgttattgcgggtttaatgtttttaggcggataaggcatttgtgcgcagatgcctgatgcgacgcttgcgcgtcttatcatgcctacaatcagtgcgggtttggtaggctggataaggcgttcacgccgcatccggcgatcgtgcactgatgcctgatgcaaatcctgctgaaagcacacagcttttttcatcactgtcatcactctgtcatctttccagtagaaactaatgtcactgaaatggtgttttatagttaaatataagtaaatatattgttgcaataaatgcgagatctgttgtacttattaagtagcagcggaagttcccggcagtgatagtcagtcactatggagatcgcggatggtaacgtcctgtactggacatgttttagataatcaacgcgccaccactcgcggagttttctcctccggtagtcatctcgtcactttgcattttcaacctcatcctttctttagttgtgttaccgacgccgtaaacggtgcgcgtagccgttttagcgcattttatccaaaagcaaactatggcttacaaggaagccaaccctctgatgttcgtgcgcataatcgcgctgccaacggcgcgtgtgatgaatacaaacaactcaaggtgctctccatgggaagacaaaaagcagtgatcaaagctcgtcgcgaggcaaaacgtgtgctgagacgggatagccgcagccataagcagcgtgaagaagaaagcgtcaccagccttgtgcagatgggcggcgtagaagccattggtatggcccgcgacagtcgcgatactagccccatcctcgcgcgaaatgaagcgcaattgcactatctgaaggctattgagagtaagcagctgatattcgccacgggcgaagccgggtgcggaaaaacctggatcagcgcagcaaaagcggcagaggccctgatacataaggatgtcgacaggattatcgtcacccgtccagttctgcaagccgatgaagatcttggcttcttacctggagatatcgcagaaaagtttgctccctattttcgcccggtctacgacgtgctggtccggcgcttaggggcttcctttatgcagtactgcctgcgaccggaaatagggaaggtggaaattgcgccgttcgcctatatgcgtggacgtacctttgaaaatgcagtcgtcattcttgacgaggcgcagaatgtgactgccgcgcaaatgaaaatgtttttaacccgcctcggggagaacgtgacggttatcgtcaacggtgatatcacgcaatgcgatttgcctcgcggcgtgtgctccggattaagtgacgcgctggaacgtttcgaagaagatgaaatggttgggatcgtccggttcggtaaagaggactgcgtacgtagcgcactttgccaacgtacgctgcatgcctacagttaagtgtgttatcggtgcagagcccgggcgaaccgggctttgttttgggtgttcccggtgtgtgcaatatacgaaaaaaaagcccgtactttcgtacgagctcttctttaaatatggcggtgagggggggattgactcgcttcgctcgccctgcgggcagcccgctcactgcgttcacggtctgtccaactggctgtcgccagttgtcgaaccccggtcggggcttctcatccccccggtgtgtgcaatatacgaaaaaaaagcccgtactttcgtacgagctcttctttaaatatggcggtgagggggggattcgaacccccgatacgttgccgtatacacactttccaggcgtgctccttcagccactcggacacctcaccaaattgtcgttcctgtcttgctggaacgggcgctaatttagggaaatcatgacctgaggtcaacaaactttttgaaaaaatcgcgcgtttattcaaacttcaatcaatgtgtggttttaataagcgaaatctgctttttttgccaccgaccacggatttgttatgctggtggcctttgtagatcataacgataagtgcgaataaatttcgcacaacgcttttcgggagtcagtatggatatcatcttttatcacccaacgttcgatacccaatggtggattgaggcactgcgcaaagctattcctcaggcaagagtcagagcatggaaaagcggagataatgactctgctgattatgctttagtctggcatcctcctgttgaaatgctggcagggcgcgatcttaaagcggtgttcgcactcggggccggtgttgattctattttgagcaagctacaggcacaccctgaaatgctgaacccttctgttccactttttcgcctggaagataccggtatgggcgagcaaatgcaggaatatgctgtcagtcaggtgctgcattggtttcgacgttttgacgattatcgcatccagcaaaatagtagccattggcaaccgctgcctgaatatcatcgggaagattttaccatcggcattttgggcgcaggcgtactgggcagtaaagttgctcagagtctgcaaacctggcgctttccgctgcgttgctggagtcgaacccgtaaaagctggcctggcgtgcaaagctttgccggacgggaagaactgtctgcatttctgagccaatgtcgggtattgattaatttgttaccgaatacccctgaaaccgtcggcattattaatcaacaattactcgaaaaattaccggatggcgcgtatctcctcaacctggcgcgtggtgttcatgttgtggaagatgacctgctcgcggcgctggatagcggcaaagttaaaggcgcaatgttggatgtttttaatcgtgaacccttaccgcctgaaagtccgctctggcaacatccacgcgtgacgataacaccacatgtcgccgcgattacccgtcccgctgaagctgtggagtacatttctcgcaccattgcccagctcgaaaaaggggagagggtctgcgggcaagtcgaccgcgcacgcggctactaataaagcatcaggattcctgctatccttggcgggaattgaatacaggagagagttatgtatcccgtcgaccttcatatgcataccgttgccagcacacatgcatatagcacattaagtgattacattgcccaggccaaacaaaagggcattaaactttttgcgatcaccgatcatggcccggatatggaagatgcgccgcatcactggcacttcattaacatgcgtatctggccgcgagtggttgatggggtagggatcctgcgcggcatcgaagctaacattaaaaatgttgatggtgaaattgactgcagcggtaaaatgtttgacagcctggatctaattattgccggttttcatgagccggtttttgcgccacatgataaagcgaccaatacacaagcgatgatcgccactatcgccagcggcaatgtgcatataataagccatcccggaaatcccaaatatgaaatagatgtgaaagccgttgctgaagcagccgcgaaacatcaggtggcgctggaaatcaataattccagttttttacacagtcgtaagggcagtgaagacaactgtcgtgaggtagccgcagcggtacgtgatgctggaggttgggtggcattaggcagcgattctcacaccgcgtttaccatgggggaatttgaagagtgtcttaaaatcctcgacgcggtagattttccgccagagcgcattttgaatgtttctccgcgccgcttactgaacttccttgaatctcgcggtatggcaccgattgcggaatttgcagacctttaattactagtaatggaaatatattaatgaacgagttttctatcctctgtcgtgtgctgggtagcctctattaccgccaaccacaagatcctttactggtgccgctgtttaccctgattcgtgaggggaaactggctgcgaactggccactggagcaggatgagttgctgacacgtttgcagaaaagctgtgatatgacgcaagtctctgccgattacaatgcgttgtttatcggcgatgaatgtgctgtgccgccatatcgtagcgcatgggttgagggcgcgacggaagcggaagtgcgcgcttttctttctgagcgagggatgccattagcggatacgccagccgatcacatcggcacattgctgctcgcagcttcctggctggaagatcagagtacggaagatgagagcgaagcactggaaacactgttcagtgagtatctgttaccctggtgtggtgcgttccttggcaaagtggaggcccatgcaaccacgcctttctggcgcaccatggcaccgctaacccgcgatgccattagtgcaatgtgggacgagctggaagaagattctgaagaataagtgtgatctacgtcactcataactgcaacggataatttgttgttgcataaaatgtgtgctcgatctcattcatggccgcgttttctgctatcatgcgcggcatgaacatacttctctctattgcaatcacaacaggcattctctccggtatctggggatgggtggctgtttccctgggcttactaagctgggcgggcttcctgggctgtacggcctactttgcctgcccgcaaggtgggctgaaagggctggcgatctccgctgcaaccctgcttagtggcgtggtgtgggcgatggtcattatttacggtagtgcactggcaccacatctggaaattctcggttatgtcataaccggtattgtcgcgtttctgatgtgtattcaggccaaacagctgctgcttagttttgttccggggacgtttataggcgcatgcgcgacgtttgccgggcagggtgactggaaactggtgttacctagcctggcgcttgggctgatatttggttacgcaatgaaaaacagtggcctgtggctggcggcgcgtagtgcaaagacggcgcaccgtgagcaggaaatcaaaaataaagcgtgaggggcactcacgctttcgcttaaacagtaaaatgccggatgataattccggcttttttatctgtcaggattccggtggaacgctcatatggcggtatttcaccagaatgtcattctgccgttctgctttattttgcaaatcccacagaccacggtcgataccatcattaatcaggaaaatgacccctgtttcgatagcgctcatcaggcacagcataacaggttcgttgctggtgtaacccacttccccttcaagcaagcgctggtagtcaataaagcggaaaaccccggcctgaacttcataggaaagtatcgtcttactggtgttcacgctagaaaggatctcgccggtactcacattgacgacgcgcaggttcacggcaatctgatcgagctggtattgcgtgtcggcaccgatgccaaaatatcttgccccaaccccgccagatttgacgttgctttcataaccgataatgctaccttcaaccatgatatttgccgccgttaaagattgcagcgggattcggttattaatggcaaccgtgccgttttcttgtgccgcacgaataatcttgcgctcgttaagcaggttttgtaagccctggcgctccagcggtataaaccagcgagaatctttcagtgccgtgaccagcattgccgtggcgctttgcggaacagcagtggagaagttacttgccgggtagggtttaaattgcccggtttcgtcctgaatgttgtatacgctaacaaagattttacccgtcggcgctggcagatgggtcaaatctttgtagctctgagcacgaggcattaatgtcggtctggcggcttctttaggcggggcggttaagcatccgctcagtaacatgacggcaaccaaaagaaataagcgctgcatgattattttccttatgaagctggggcttaaaaatcggtactgttattttgtaaaccgctaacctggatggtgctggtttgtccggttttacgatctgtcacgttcaactgcaattgaccatcgcggttggcaatatcgacaatataatcgttggtcaccatgcggcccggtttaccggtattaatattgctcagtagcccacctaaaatttgactctggatggcctgagtaaagttatctaacgcactgggtgtttcaataccaaagtcatcgttatagctcggatctttataagagttttgggcctgagcgctatttaataaaaaagcgccattatttgggttaccaccaaagtttggattacggaactggaaagtcatggttccagcccaacttaatgggctaataagcatgagtagaactactgcatgtttgacacgcattgcagcctccgaacaattttttatttagaattcatcatgcgccaaatcgcccgtacttaataacgcctgatttatctggcgacgatttagtgcttcttcagtttgaatcagtgcaaagacgacagttttctcgaagtctcttttcaacggaaataaaaaagtctggaaaataacgtcctgattgaccgttatagtgatccagcttccccatcgtgcactgggcctttcattaatcgttaagttacccgtatagtcactttcccatttatcactaaaggctcggtaaaaatcatggccaatagaactaacagtatggtcagttagcaatcccgggacttctacctcaacggcgtgaagattccctgcggcgaacagaaattctgccgccacaatccagcgtaaataacgtttcatggctttatcgcctgaggttatcgtttgcccaggaaaccgcttgtgtccggttttttacggctatcttcttgaaaagattataaagatgcgttttaaccgtattttcgctgatgaacaagctacgagcgatctcgttattagacgcgccgatacgcagcttattcaggatctctttttcccgatgagtaaggagggcactttccgtgctgttataacgatagttaccactatgcgtaatcaggtagctggcaagcttttgcgtaaagtagcattcgccgcgcaggacgccttgcaacccattgacaacacgttcttgatcctccatggaataaaaaacgccgttgatatgaggccagttttcaatgtcgcggtacgggtaatcttcaggcgtatttagcaacaatattttgatattgttgtttttcctgctcaaagtatcctgccaataatggataagctttttatccgcttccatcatatccagaagaataatagagccactagagatatcgtccagagaacgttgaatattatgtaattttcctgtaattgccaggctttgtttaaggtgctgcaagagagctgtcgcctgcaaagaagatttagtgatcaacaataatgtatgaccatgaatactatggacttcattaaacatgatgaaaccccgctttttttattgatcgcacacctgacagctgcctctaaaatagaagcaccagaagtactgacagatgttgcactgctgtgtgtagtaataaatcagccctaaatgggtaaaatataaaactaatggattacatctgatttcaatctagccattacaaatcttaaatcaagtgttaaacatgtaactaaatgtaactcgttatattaaaatgttaaccttaaggttttattaagtttagaaatgatagaaaagttgtacatttggtttttattgcacaattttaaaaaatcatacaaatggtgataacttactaataatgcatataaaaaatatttcggtgtagtcctttcgtcatgtaaaacgttcttgttttttctccacacctccgtggacaattttttactgcaaaaagacgaggtttgtcacggcttgtgcgcaagacatatcgcagcaatcagcgacgggcaagaagaatgactgtctggtgctttttgatagcggaaaacggagatttaaaagaaaacaaaatatttttttgcgtagataacagcgtatttacgtgggttttaatactttggtatgaactaaaaaagaaaaatacaacgcgcgggtgagttattaaaaatatttccgcagacatactttccatcgtaacgcagcgttaacaaaatacaggttgcgttaacaaccaagttgaaatgatttaatttcttaaatgtacgaccaggtccagggtgacaacatgaaaaacaaattgttatttatgatgttaacaatactgggtgcgcctgggattgcagccgcagcaggttatgatttagctaatagtgaatataacttcgcggtaaatgaattgagtaagtctagttttaatcaggcagccataattggtcaagctgggactaataatagtgctcagttacggcagggaggcagtaaacttttggcggttgttgcgcaagaaggtagtagcaaccgggcaaagattgaccagacaggagattataaccttgcatatattgatcaggcgggcagtgccaacgatgccagtattagccaaggtgcttatggtaatactgcgatgattatccagaaaggttctggtaataaagcaaatattacacagtatggtactcaaaaaacggcaattgtagtgcagagacagagccaaatggctattcgcgtgacacaacgttaatttccattcgacttttaaatcaatccgatgggggttttacatgaaacttttaaaagtagcagcaattgcagcaatcgtattctccggtagcgctctggcaggtgttgttcctcagtacggcggcggcggtaaccacggtggtggcggtaataatagcggcccaaattctgagctgaacatttaccagtacggtggcggtaactctgcacttgctctgcaaactgatgcccgtaactctgacttgactattacccagcatggcggcggtaatggtgcagatgttggtcagggcagtgatgacagcagtatcgatctgacccaacgtggcttcggtaacagcgctactcttgatcagtggaacggcaaaaattctgaaatgacggttaaacagttcggtggtggcaacggtgctgcagttgaccagactgcatctaactcctccgtcaacgtgactcaggttggctttggtaacaacgcgaccgctcatcagtactaatacatcatttgtattacagaaacagggcgcaagccctgttttttttcgggagaagaatatgaatacgttattactccttgcggcactttccagtcagataacctttaatacgacccagcaaggggatgtgtataccattattcctgaagtcactcttactcaatcttgtctgtgcagagtacaaatattgtccctgcgcgaaggcagtagtgggcaaagtcagacgaagcaagaaaagacccttagtttgcctgctaatcaacccattgctttgacgaagttgagtttaaatatttccccggacgatcgggtgaaaatagttgttactgtttctgatggacagagtcttcatttaagtcaacaatggccgccctctagtgaaaagtcttaatttgttgaaatatcgagcataagatgaatctggagagaatggtctgctgcgaatcagccaacctgaaagtatggataacacaaccctcaaggatgactaatcattgaggaaatagaataaatgttcagaccttttttaaactctcttatgctcggcagtttgttttttccttttattgccattgctggaagcaccgtgcaagggggcgtgatccatttttatggccaaattgtggaaccggcatgtgacgtcagcacccagagtagtcccgtagaaatgaactgcccacagaatggttctattccgggcaaaacctactccagcaaagcgttaatgagcggcaatgtcaaaaacgcgcaaatagccagtgtaaaagtgcagtatcttgataaacagaaaaagctggctgtaatgaacatcgaatataactaagtttctgaacaactcacgttgctgagcagaaaaatgcgatttaaccaaaaagcctgctgtacacttaagaaacaagaaggtgtaaggaggcgttatgaaaacgcgtattcatgttgtgcagggtgatattaccaaactggccgttgatgtgattgtgaatgcggctaatccgagtttaatgggaggcggcggcgtcgatggggccattcatcgcgcagcgggtccggccctgctggatgcttgtttaaaagtcaggcaacagcagggcgattgccctacggggcatgccgttattacgcttgcaggcgatcttcccgctaaagccgtagtgcacaccgtcgggccagtctggcgtggtggtgaacaaaacgaagaccagcttttgcaggatgcctatctcaatagcctacgactggtggcggcaaacagctatacgagtgtggcttttcctgcaatcagtactggggtttatggttaccctcgtgcggcagcggctgaaatcgcagtaaaaaccgttagtgaatttattacccgtcacgctttacccgaacaggtatactttgtctgttatgatgaagaaaacgcccacctctacgaaagactccttacccaacaaggagatgaatgatttgccccggctggcgagcgcggtgctgccactgtgtagccaacatcccggtcagtgtggcctttttcctctggagaaaagtctggatgcgtttgccgcccggtatcgtctggccgaaatggcagagcatacgctcgatgttcagtattacatctggcaggacgatatgagcggtcggttactgttttccgccctgttagccgcagcaaagcgtggcgttcgcgtccgtttgttgctggacgacaacaatacgcccggacttgacgacattttacgcttgcttgacagtcatccacgcattgaagtccggctttttaatcctttcagctttcgcttgctgcgtccgcttggttatatcaccgacttttcccgtcttaatcgccgtatgcacaataaaagtttcactgtcgatggcgtggtgaccctggtgggaggacgaaatattggtgatgcctattttggagcaggggaggagccactttttagcgatttagatgtcatggcaataggacccgtggtagaggacgttgccgatgatttcgcccgctactggtattgcaaaagcgttagtcccttacagcaggtgctggatgtcccggagggtgaaatggcggatcgcatcgagttacccgcctcctggcataacgatgccatgacgcatcgttatttacgcaaaatggaatccagtccatttataaatcatctggttgatggaacattgccgcttatctgggcgaagacacgtttattaagtgatgatccggcgaaaggggagggcaaggcaaaacggcatagtctgttaccgcagcgcctgttcgatatcatgggcagtcccagtgaacgcatcgatattatctcttcctattttgtaccgacacgcgcaggtgtggcgcaactcttacggatggtgagaaaaggggtaaagattgcgatcctaaccaattctcttgccgctaacgatgttgctgtcgtccatgccggatacgcgcgctggcgcaaaaaattgctccgctatggcgtggaattatatgaactcaagccgacgcgtgaacaaagtagtacgttacacgatcgcggcataaccggtaattccggagccagcctgcatgctaaaacctttagcatcgatggtaaaacggtgtttatcggctctttcaatttcgatccgcgtagtacattgctcaatactgaaatgggcttcgtgatagagagcgaaacgctggcacagttaattgataaacgctttattcagagccagtatgatgcggcctggcagctccgtctggacaggtggggacggatcaactgggttgatcgtcatgcaaagaaagagattattctcaaaaaagaacccgccaccagtttctggaagcgggttatggtcagactggcgagcatattgcccgtggaatggttattgtaaatgtggcttaacgggctggtgctttatcgttctcacgcttaacaaccggtttaccagagaacaaaaacttcagtaacgggatgcgcaaatgaatttcatacagaattatcgcaatccctactacaaatatcaggccacagagaaaaccaagccagttggaggtgatgtgcggtgtaatgtatgcgccgaaaaacagcgttaacgggtggtgaaccagatagataaacaggcttgcgttaacaaaataagtcacccgcgcactctggaagttaagcaaacggtggccaaaggagaagaccacattcaccatccacagaccgaggaccatggtgatcacgctctcggtttcgtacatccaggcatcgccactgccatagcgctggttgagtaaataagcgacaaacgccaatgctgctgcaagggtacagccacgagacggcgtggtaaacaaggctttaagatgagggaaaatgaaagccagtgcgccgaggataaagaacggcaaataaaacagcgtttgcatgacaataaaattgaacatgccattactcagaatgggcggatacacaataaaaatcgttcttcttattaccgcataaccgatgccgaggcataaaaaaatcacgcttagttttaccatgctgaattttttattcgttttatcagaattttctaaattatttctgatgcgcttaaatatccatacgcacagcgtcgtcatgaccactaacaccagtaaaaaccacaggtgacttattaattcccaggccaacgtattatatttgtcatacaaactcagcccaggccaactttccgcttttcctttgacatattgcagcataataaattgcggtaatgtcagtagggggatggctgttaacatcgggatacctacacgttcgacacgtactttccaccattttttcaagggatagcgtaaaaaaagcatgtaggaaaagtagccggatataacgaaaaatacctgcatgcggaagctgtggatgaagtcattaaaaagggtcagccacaaactactttcggcgctattcacatgccatgtatggctgctatagattaaagaaatatgaaaaggtatccctaacaacatcagccaggcgcggatggagtcgaggaaatattcacgttgcgcgggtactgggttcatatatggttaactaatctcggatttttcgtcttatccctgtcgggttatgcctttaggcttgttgccatagtgacaccgacctgaccgcgccaggcgcaggcttcaaggtttttatgcatagcatcatcgctaccactaaccagaatggaagcgtctgtaagacggttgataaataaatttgctggcaaaccctacacgaagtcgatgcttctgtctttaggagaagcacggaaagtgaaaacggttgcaatcaggtgcttaatccatgagccagcgtgctgaacgataccgggattctgttgtcggaatggctggttatccattaaaatagatcggatcgatataagcacacaaagggggaagtgcttactaattatgaaacataaactacaaatgatgaaaatgcgttggttgagtgctgcagtaatgttaaccctgtatacatctagtagctgggctttcagtattgatgatgtcgcaaagcaagctcaatctttagccgggaaaggctacgagacgcccaaaagcaacttgccctccgttttccgcgatatgaaatacgcggactatcagcagatccagtttaatcatgacaaagcgtactggaacaatctgaagaccccattcaaactcgagttctaccatcagggtatgtacttcgataccccggtcaaaataaatgaagtgactgccaccgcagtcaaacgaatcaaatacagcccggattatttcactttcggcgatgttcagcatgacaaagatacggtaaaagaccttggctttgccggttttaaagtgctttacccgatcaacagcaaagataaaaacgatgaaatcgtcagcatgctcggggccagctatttccgcgtgattggtgcaggtcaggtttatggcctttctgcccgcggcctggcaattgataccgccttgccaagcggtgaagaatttccgcgcttcaaagagttctggatcgagcgtccaaaaccgactgataaacgtttaaccatctatgcattgcttgacagcccgcgtgcgacaggtgcttacaaattcgtggttatgccagggcgtgacacggttgtggatgtgcagagcaaaatctatctgcgcgataaagtcggcaaactgggggttgcaccgttaaccagtatgttcctgtttgggccgaaccaaccgagccctgcaaataactatcgtccggagttgcacgactctaacggtctctctatccatgccggtaatggcgaatggatctggcgtccgttgaataacccgaaacatttagcggtcagcagcttctccatggaaaacccgcaaggctttggtctgttgcagcgcggtcgtgatttctcccgctttgaagatctcgatgatcgttacgatctccgtccaagcgcatgggtgactccgaaaggggagtggggtaaaggcagcgttgagctggtggaaattccaaccaacgatgaaaccaacgataacatcgtcgcttactggacgccggatcagctgccggagccgggtaaagagatgaactttaaatacaccatcaccttcagccgtgatgaagacaaactgcatgcgccagataacgcatgggtgcaacaaacgcgtcgtagtacgggggatgtgaagcagagcaacctgattcgccagcctgacggtactatcgcctttgtggtcgattttaccggcgcagagatgaaaaaactgccagaggataccccggtcacagcgcaaaccagcattggtgataatggtgagatagttgaaagcacggtgcgctataacccggttaccaaaggctggcgtctggtgatgcgtgtgaaagtgaaagatgccaagaaaaccactgaaatgcgtgctgcgctggtgaatgccgatcagacgttgagtgaaacctggagctaccagttacctgccaatgaataagacaactgagtacattgccgaagactgatatccgcgccgttcatcaggcgctggatgccgaacaccgcacctgggcgcgggaggatgattccccgcaaggctcggtaaaggcgcgtctggaacaagcctggccagattcacttgctgatggacagttaattaaagacgacgaagggcgcgatcagctgaaggcgatgccagaagcaaaacgctcctcgatgtttcccgacccgtggcgtaccaacccggtaggccgtttctgggatcgcctgcgtggacgcgatgtcacgccgcgctatctggctcgtttgaccaaagaagagcaggagagcgagcaaaagtggcgtaccgtcggtaccatccgccgttacattctgttgatcctgacgctcgcgcaaactgtcgtcgcgacctggtatatgaagaccattcttccttatcagggttgggcgctgattaatcctatggatatggttggtcaggatttgtgggtttcctttatgcagcttctgccttatatgctgcaaaccggtatcctgatcctctttgcggtactgttctgttgggtgtccgccggattctggacggcgttaatgggcttcctgcaactgcttattggtcgcgataaatacagtatatctgcgtcaacagttggcgatgaaccattaaacccggagcatcgcacggcgttgatcatgcctatctgtaacgaagacgtgaaccgtgtttttgctggcctgcgtgcaacgtgggaatcagtaaaagccaccgggaatgccaaacactttgatgtctacattcttagtgacagttataacccggatatctgcgtcgcagagcaaaaagcctggatggagcttatcgctgaagtcggtggcgaaggtcagattttctatcgccgccgccgtcgccgcgtgaagcgtaaaagcggtaatatcgatgacttctgccgtcgctggggcagccagtacagctacatggtggtgctggatgctgactcggtaatgaccggtgattgtttgtgcgggctggtgcgcctgatggaagccaacccgaacgccgggatcattcagtcgtcgccgaaagcgtccggtatggatacgctgtatgcgcgctgtcagcagttcgcgacccgcgtgtatgggccactgtttacagccggtttgcacttctggcaacttggcgagtcgcactactggggacataacgcgattatccgcgtgaaaccgtttatcgagcactgcgcactggctccgctgccgggcgaaggttcctttgccggttcaatcctgtcacatgacttcgtggaagcggcgttgatgcgccgtgcaggttggggggtctggattgcttacgatctcccgggttcttatgaagaattgccgcctaacttgcttgatgagctaaaacgtgaccgccgatggtgccacggtaacctgatgaacttccgtctgttcctggtgaagggtatgcacccggttcaccgtgcggtgttcctgacgggcgtgatgtcttatctctccgctccgctgtggtttatgttcctcgcgctctctactgcattgcaggtagtgcatgcgttgaccgaaccgcaatacttcctgcaaccacggcagttgttcccagtgtggccgcagtggcgtcctgagctggcgattgcactttttgcttcgaccatggtgctgttgttcctgccgaagttattgagcattttgcttatctggtgcaaaggaacgaaagaatacggcggcttctggcgcgttacattatcgttgctgctggaagtgcttttttccgtgctgctggctccggtacgcatgctgttccatacggtcttcgttgtcagcgcgttccttggctgggaagtggtgtggaattcaccgcagcgtgatgatgactccacttcctggggtgaagcgttcaaacgccacggctcacagctgctgttagggttagtgtgggctgttgggatggcgtggctggatctgcgtttcctgttctggctggcaccgattgtcttctcgttgatcctgtcaccgtttgtttcggtgatttccagccgtgccaccgttggtctgcgcaccaaacgctggaaactgttcctgatcccggaagagtattcgccgccgcaggtgctggttgataccgatcggttccttgagatgaatcgtcaacgctcccttgatgatggctttatgcacgcagtgtttaacccgtcatttaacgctctggcaaccgcaatggcgaccgcgcgtcaccgcgccagtaaggtgctggaaatcgcccgtgaccgccacgttgaacaggcgctgaacgagacgccagagaagctgaatcgcgatcgtcgcctggtgctgctaagcgatccggtgacgatggcccgtctgcatttccgtgtctggaattccccggagagatattcttcatgggtgagttattacgaagggataaagctcaatccactggcattgcgtaaaccggatgcggcttcgcaataaaaacgtagttgcctgatgcgctacgcttatcaggcctacatcgttcctgcaatttattgattttgcaagactttgtgggtcggataaggcgttcacgccgcatccggcaaaaacaacgagccaataaaaataccggcgttatgccggtatttttttacgaaagaggtatcaaatgcgtttaattgtggtgagcatcatggtgaccttgctgagtggctgtggcagcattattagtcgcactataccggggcaggggcatggcaaccaatattatcccggtgtgcaatgggatgtgcgtgactccgcctggcgttatgtcacgatccttgatctgccattctctctggtttttgatactttactgctgccgatcgacattcatcatggcccgtatgagtgattaacgttcatcccactcatcagctgctgcgcgtccttcctcggtatccagcggtggctcaagctgaaattccccctcgtcccattcatgtaatgtattctcttcctgccactcctggcgtatctctatctcatcatagtcgccatcaaaaacactttgcgcggcttcaccgctaagcataggtaaacattcaccttcttccccttcgtcggcaaaaaactcaacttgccacatgatgtcgccgtcctgcaaaacgtatttttgggcattgaactgttgcacattcgcatcttcggcgtcgatgccggggttgtctgcaagaaattcttcgcgtgcagcgtcaatggcttcttcaagcgttgcgtacatggtcatcacgattctccctttgagttgatgaggtttcagggaaaaggatagctgattctccgcttttgcaagtatgaaaggcgaaaaatcagttgcttacctggggtattcgacgacgacgtagactgttccaactatagactgcgttgaataacactacgccagcggtgacgagaaataccgctctgaaaccgtagttcgcactaatcgctgctcccatcaatggtccggtaacgttgccaatatcacgaaagctttggttatagctgaagatacgcccggcgatctggttgctgctgttgtaaaccaacagtgtctgtacggcggggagtagtgcaccatcggcggcaccgagcaaaaaacgtaaaatcccaagttgcaatggcgtctgaacgtaagacattgggatcaacagcagtacagaaaagatcagcgctgtaatcaggatcttttcgggtccgattcgatcgccaagtttgccgagtcgtggtgcacttagcagagccgccacgcctggcacgctggcgatcatgccactgataaaggcgacgttactgacgttacccgccagttcgcggacatacagcgtcagaatgggggcaatactgcccgtcgccacctggatgattaacgtagtgacaaacaggctgagtaccagtttcgggtttttaagacttgtcaccacttcccgcatgtgcagcatctcttttttgctgaccggctggaatttttctctgatgcaaaacagggtgacgaaaaagcagagtatgagcacactggcggtaataaagaataccggacgtaagccgtagctatcggcgagcaggccgccagccattgggccgagcaacgcaccactaacgccgcctgtggagagcgtacccagcgcccagccgcttttattacgcggtacttgtgtggcgataagagcattagcgttggggacaaatccgccaagtaacccaagaagcgcccgcaggatcaaaaactgccagatattttgtgccagccccatcaacaccatcacgatgcccatgccgagggcagagcgtaatagcatgagttttcggcctttacggtcggcgagtccaccccaaaacggactggcgatggcgctaaataaaaatgtaatgctgaagacaataccggaccacatattcagggcggagtgaccggtaacgccaagctgctcaacgtagaggggtaagaagggcattaccagactgaaggcggcaccggtaagaaaacagcctagccaggcgacgatcaggtttcgtttccagtttataggggtgtcattttcacagggactcatagcaatccgctgttggtgcgccaggcgcggtgaacataagaagaaaagataagcacactaattatgcgcccgacttccagggggcgcaatccagagagcttttatcgctaaatcagggggatttgctgtggtaatgccggatgccattctgaagcatccggcatgggagatttaatagcgactaggaacgccttccgggcgtgttttaaagcgacggtgtaaccacatatactgctctggtgccatcatgatgcatttttcgaccactttgttcatccacgcggcggtagtttcggcatcatccagtggcggagaacactctggcggcagcataatcaattgataccctttgccatctggcttacggcgtggaacgaagggcaccagacatgcgccggacatccgtgccagcatccaggttccggtcgtggtcgcagcctgctcaacggcaaacaacgggacgaaaacgctactgcgcgggccgtaatcatgatccggtgcgtaccagaccacttcgccttttttcagggctttaatcatgccttttaaatctttgcggtcgagcatgcttttattactgcgcaaacggccccaggtttgtagccagtcaatcagtggattatcgttcgggcgataaacgccaatacccggttcctgcataccaaactgccgcgcacccagctccagtgtcagaaaatggatgccaactaacaggatgccgcgtttttgcgcctgcacgtcacgaatgtgttccatgccgatcacttccgtccagcgggcgattcggcggtccggccagaaccacgccatgccggtttccatcaggcccatgccaacggattcgaaattcttcaccaccattttacggcgttcttgttcgctcatttccgggaagcacagttccaggttgcgatgcacaatttttgcgcgtcgtttcataaaacgtaacgccagttttcctaatccacaaccgaggcggtagataaccgggtagggcaattgcacgactaaccaaagtacgccaatacccaaccaggttaaccaataacgcggatgaagcagtgcggtggagaacttgggtagattcgtcatatcaatcctgtttttcaacctattcgggcaattgtatgtattgtcgcattttttcgcccgcaaccaaaatttgtggctgaagactgggcgaaattgccgcgcttgtaaataacaaataatttttaatgcgcaaatgtagcgtaaaatgtgtggatgttaattatcgataattgctatatcatgccgcggatttttactttcccatctcgcaggaaccgtacaccatgccagtgttacacaaccgcatttccaacgacgcgctaaaagccaaaatgttggctgagagcgaaccgcgaaccaccattagcttttacaagtatttccacatcgccgatcctaaggcgacccgtgacgctttatatcagctgtttaccgcgctgaatgtttttgggcgagtgtatctggcgcatgagggcattaacgcgcaaatcagcgtacctgcgagcaatgttgaaacatttcgcgcgcagctctatgccttcgacccggctttagagggtttacgcctgaatatcgcgttggatgatgacgggaaatccttctgggtactgcgcatgaaggtacgcgatcgcattgttgccgacggtattgacgatcctcactttgatgccagcaatgttggtgagtatctgcaagcggcggaagtgaacgccatgcttgacgatcccgatgcactatttatcgacatgcgtaaccactatgagtatgaagtggggcactttgaaaacgcgctcgaaattccggcagataccttccgtgagcagctgccaaaagcagtcgagatgatgcaggcacataaagataaaaaaatcgtcatgtactgcaccggcggcattcgttgtgaaaaggccagtgcctggatgaaacataacggattcaacaaagtctggcatatcgagggcggaattattgaatacgcccgtaaggcgcgcgagcagggcttgccggtgcgttttattggcaaaaattttgtttttgacgagcggatgggcgaacgtataagcgatgagattatcgcgcattgccaccagtgcggcgcgccgtgcgacagccataccaactgtaaaaatgatggctgccacctgctgtttattcagtgtccagtatgcgcggaaaaatacaaaggttgttgtagtgagatttgctgcgaagaaagcgcgttaccgccagaagaacagcgacgccgtcgggcaggacgtgaaaatggcaataagatctttaataagtctcgtggacgtctgaatacaacactgtgcattcctgatccaacagaataaatatcattgccggatgcgtgccatccggcaacatttcacgcttacttctgctgtacgccttccacactaataatcagatccacttcctgagaagctggacctaaatctgtcttgatattgaagtccttgagcttaattttgccttcggcctcgaagcctgcacgtttaccaccccatgggtcgtcgccctgaccaattaatttcgcttccagcgtgacgggtttggttacgccattcagcgtcagatcgccggtaatatccagttcgtcaccgtctttcttcacgctggtggaggtgaatgttgcctgtggatattttgcggtattgaggaaatctgcactgcgaagatgtttatcgcgttcggcgtgattagtatcgacgctggtggtgttaattgtcacattcactttatcggcagccggatttttttcgtcaaaggtaaaagtaccgtcgaaatctttaaaggtgccgtataaccagctatagccaaggtgctggatgcggaaattaacaaaggcgtgctgaccttctttgtcaattttgtaatcggcggcaaccgcactaccggcagagaacatcagggacgcgaaggttaaaccaagcaggctttttttcattttttatactccatagtcagaactgctctttcccagcatgcgcttcagagtgtcgtctttatcgatgaaatgatgcttcagggccataaatccgtgcataacggacagtactacgacgctccacgcgagccaaaaatgcagggcaccggcaaagtctgcctgtgcgccagcgtcggcaagggtcgcggggacgtcaaaccagccaaaaacgctgatcggtttaccatcggcagtactgatcagatagccgctgatgccgatggcgaaaagcaataggtacaatgcgagatgtccagctcttgcggcaagacgagtcatggggctataactcggcagcggacccggcggtggagatatgacacgccacagaacgcgaataaccagccccatcattaacaaaataccgatgcttttatgcagttcgggtgctttgtgataccagccatcgtaataactgagcgtgaccatccacagacctaaagcaaacatgccgtagacaataattgcgcttagccaatggaaggccgcagatataacaccatagcgttcaggggtatttgtgaaactcataagtgcatccaaaacgaatttgcgagagaaagaaaatggcgtgtcggagaatgaattgcaacacaaaaataacaaattgaatgatatttatttttatttcaataattttgaattaataatgaaagaatcttcataagtttagtgggttcagcatcagagatgtctggtgagtgctgtagaagcaggaataatctcattcaatttttcacgctaaatgaaagggagattaaatatttgtcagtttatgtcagtgcggaaaattaaaaataaaacacatagatcagatccataattgccaacaatccccagagaaaaagataaagcatcagatgctcgcgaatattattgatgagatagtgcaacagccgacgcattaaatactcctgtaaaaacggcctcattctggaggccgtaatgatgattattggaagcgggaaagcctgaatggcgtcaaatcaaaatcgctttttttgtcttgcgcaaaatcggcagctatttcccctaaaacactcgcaaatttaaaaccgtgcccactcaggccggtaatgagcagtgtattatcgtggccgggtagggtatcgataataaaatcttcgtcagggctattatcataggtgcaggcagcgccgtacaggcagcaaccgatacccggcaatacattgcgcaagaacgggaaggcttcactcccatcactggccacttccgcaaacggaacacgttcatccgcactatggataacctggcctccgttatgtttgccaatcttcaacgcgtcgttttctgccggaaaaccataatattgatcgccattgggcagttcaccggtaaacgccgggaatttattcttcacgctatagcggccatcggcctgataccaggcaaatactttgcgtacgggctggacaggcagctccgggagcaggtcttttacccatgttcccgcgcagacaatcgcttttttcgcctgatactcaccgtcagccgtttcaatagttacgccatcatcgtcatgacgaattgcggtgaccgggcagttgaacagttgcgcacagcccgcttccttcgccagttggatccaggttttaatcgccagttcgctgcgcaaaaaaccggaatcagtttcaaataagccgatgtagttgtccgggacgcgtatttccggccagcgggccataatcccttgcgcatcgagcttttcaacgttgagttgccattgttcggcgctgtgggcgacgttggcgagaaatgtggaatcagccgggccaaggttaatgacgccagagcgtacaaaaatgggatcttcttcgttgtggcgggagagttcatcccacagcgtttgcgcgcggaggaccagcgggacatacttttcgccttcaccataagcatggcgaattaatcgcgtatcgccgtggtggctgccgtgttgatgcggtggcatatgggcgtcggtcattagcacgtttaaaccggcgcgggttgcataatacccggcggcagcgcctacggaaccgctgccaataatgatgagatcgtatttcatttttttctctctgctctcatggtttaagcagagtaattaactgaatgcagatatacaacccagaaatggtaaaggcaccggtgaggtgccttttgggtggatggtcatgtcatgttaatgacgccgatactcgtttacctggaaatcaccggattcaattttggcgattcctgcttctaatatgctaataaattgtctggcaacatcagtggttaaccagagcgtctgaccaacttcagtcccttcctgctcggacttatttggggtctggtagtgcaaacgcaacatcagcgcatcatagctatcaacggtgctgatgtcccaccctacgagcggatgagtctgaatgacttcattatttttttccatcatggccccctaattcgtgttactagacaacgttattcgaggttcaatgcgtttttatctgaagcaacttcagtataccaataagtaagggtattcaccgaatttttaaagggggaaacagataaatttctgcttttaagatttatatgaacaataaaacagcatgtcattcatatttttttagcatattgtgcaattattttgaggaagtgtagaaattttgtactcaaaattcgtaagtaaaataaaaaagccggggcgacccggcaaaaaaaatcactgcatattattcgctgacaaaccagtcatcggcgctttcccacgtttcctggagaatttcactaatgcgctgtttatcttcttttgtcgcgccaataacgcttaaattattcgctgcggcataacgtacgcttacgtggccttcattatcaggaaacgcatactgaatacggcgggaaagttcgccagccagggcgtcaatagccccagctggcaatggagaagttttcgctatggtgacttcaattcgcataatagccccctgttgaatatactggttatttatacaggtaaaataacctaatgacaacaggaagctacgatttttattgtttaacggaccagcgtaccgtttccccggcgaggaatggcaccagcgtgtcatcagtcagtgcgatgctttcagcaacctgttgctcttcacgtaccagttcgatgaatgtgtcgttgaccggcaacccatagaactgcgggccgtttacagaacagaatgcttcaaagtgctgcaaagcattcatttcttcaaagacggtagcgtaactgcccagcgcggttggggcgttgaagcagcccgcgcagccgcaactgctctctttgcgatgacgtgcatgtggcgcagaatccgtaccgaggaatactcgattaaaaccgctggcgaccagttcacgcaatgcctgttggtgaatattacgtttgaggatgggtagacaatacaggtgcggacgcacgcctccaaccagcatatggttgcggttaaacatcagatgctgcggagtgatggtggcagccagccgttcatttccgtcacggacatagtcggcagcatctttggtggtgatgtgctcaaaaacgactttcagcgcagtcaggcgctggcgcagaggttccatcacgctttctataaagcgcgcttcacgatcaaaaatgtcgatatctgcatgtgtcacttcaccatgcaccagtagcggcataccgattttttccatgcgctcaagtaccggcatgattgcgtcaatactcgtcacgccgtggctggagttagtggttgcgtttgccgggtaaagttttgcagcggtgaacacgccttcgttaaatccgcgctccagctcattaggatccaggctatctgttaaataacaggtcatcaatggggtgaaatcgtgcccggcaggtacggcgtcaagaatacgctggcgatacgccacggcagcctcaacggtggtcacgggcggagccagattgggcattacgatagcccgtccataaatttcgctggtatatggcacgacagtttttaacatgtcgccatcgcggaggtgaaggtgccagtcgtctgggcggcggatctttaatacctgggatggtgcagtcattaatctctatgctccggctgaagggatgtttttgccggacacaaaggataagcggaaacgttttcctttgcacgaaaaataaagggcgcgaatgcgccctcgtgattaatcagtaaatggaatgacaatttcgcctggcttcacttcaatgcctttcgccagttttttcgccattgcttcgccctggctgccatcttcgcgcaggacgtaagcaggttgctggttaaagtaattgcgtaatgcctggttcaaatagggaagcaacgtttgcatcaccgtttgcattttttccggttgtaccgtcgcatcgaccacttccatctctttcaggaagatcgcacctttttctttatcaaacacgggcagcgctttcagcttcagtttcatggtcgctttctgactaccgaacagggagttcatgtccagattggcgtctccggttagggtaaccttattcggctcttcgcgaccaatttggctggtcaggtttgtcagaacaatatgggcgtcagccacgccgggtaaaccgatatctttactgaaattattatgtttcgcaaggctctggttaatttcttgttcggtgatggtgtattgggtgagttgattacagccaacgagcaggccactgacgatcaatgcagcggcaaataaaaacttgttcatggtagtcctcgacatgaaatctgcgtcaatatcctgacacaacgcagcatgtgtcaccagcgataaactcgccagcagaaaaaactgaaaacggcggcaacccgcgaatacaggctgccgcggcgggtcaggattaaatcgccatactacttaacaaattgatttgtgtctgtttcgccatattatcgcggtaatcagcaacgcggcttggccagttaattccggctaccagcgtcagattacgcagtagcgggaatagctgaatatcatcttcgctaagttcgccattcacggcgttcggtttgacgatcagtttgtccagcgcacgtaaatcatcgctgatattcttaatcagaccgtcagagtgggccagcaggtcggcaaaattacccgcgctggcctctttcttgtcgacgaaatatttgcgcgcggcgggagtagaaaactcatcaaatgcgcttttggcaaaacgcggcaacagcagtttgttggcgtagccattgaccttgcgcagccactcttcaatggcaggggaacgtttgccggtcagtaacggtttgccgtcgagtttatcgacatagtgaacgatgtccatgctttctggcatatagcggctgtcatctttttgcagaatgggaacctgtttttgaccgaccatccgggtgggtgtttctgcgtcgtcgttgagcagaacatgtaattcgacggggatatttttcaggccgaaaatcatgcgggctttgaggcagtaagggcagtgatcgtaaatgtatagcttcacgtgactcctccatttggctgtcagttcactttcagtatgaaggagtcaggggggagtatcaaatcaggcgtcgcgttcaagcaaacgacgcgcggcgcgtttctggctaaactgccaacccagcgcaaggaaagtgaagatgccaataatgcccagcatcatccacggaagctctggctggtgcgcgcttttgcccaggtcaaacagccagccgccaccgatataaccaatagcgccgccaatcgccagacccagacggctaaaccccatatagctgccgcgagctcttgcgtccgccaggctagcacttaaggtttcacgcgcaggctcggcaatgatgctcccgatataaaacagacaaatcagggtgaaaagttgttgcaggccgctgaccatgcccaccggcatcatgcttaaactcattatcaacagcccagccatcaaccggtgttccagacgaaaatgcttttcactccagcgggcgatagggtagagcaacgttaagctcagacacgcttcaatggcatacatccatttaacggcagagggcgcgccagccacgtcgttgaccataattggcagcatcagcatcacttgtacagccagcatgtagtaacccgccagcgtcagaacataggtgacaaaacgcttgtcacgcatcacgcgggtcatgccttcgcgaacgggcgtgcgtacggtggagagtttccatgctggtaacaaccacgcattgaacgccgcacatagcacaaatagaactgcccctgtggcgcagaccaggcgaaagtcgtattgcaacagccagctccccaacaatgcgccaatgaccgcaccggcactgtcctgcatcatcaacaggctgaaaaaacgaccacgctgctgtggacggattaatttcaccaccagcgcgctacgcggcggatcaaacaacgtgccaccgagtccgctgagcaggcaactaaaccacaatagccacggttcgtgggcgatacccattgtggcgaatccggcggcgcgcatcagcataccggtaacaatcatcggtttggcaccaaagcggtcggcaattgcaccgccgaaaatacccagaccttgctgaataaattggcgtagaccgagagcaataccgaccatgacggcggcccagcccatttgatcaacgaagcggatagagatcagcgggaagacaacaaagaaccccagcacgaccagcatattatcgatgagcaggaaatatttacccaggttcctcgcctggctcacgcgggacatttcccctcccgggaaataaaagatgagcactttctattctgcattgccgctaagacttttcccatcacttcggggacaatatttttttatcaaaacgtcgctttgatagagagtttttatcaaatatgtgaataatgcagaaaatggcattttggacttttcacagggtctggttgcgcaggtatagtaatacttacagcgtattaaagacgttacgggaaggagtaggtatagaatgtttggctatcgcagtaacgtgccaaaagtgcgcttaaccacagaccgactggtcgtgcgtctggtgcatgatcgtgatgcctggcgtcttgcggattattacgcagagaatcgccatttcctcaagccctgggagccagtgcgcgacgaaagccactgttatccaagtggctggcaggccaggctggggatgattaacgaatttcataaacaaggtagtgctttctactttggcttattcgacccggacgaaaaagagattattggcgttgccaatttttccaatgttgttcgtggctcttttcatgcctgctatctcggttatagcattgggcaaaaatggcagggcaaaggactcatgtttgaagccctgaccgcagccattcgttatatgcagcgcacccaacatattcatcgcattatggctaattatatgccgcacaataaacgcagcggtgatttactggcgcgactgggttttgaaaaagaaggctatgcgaaagactatctgttgattgatggacaatggcgcgatcacgtactgacggcattaactaccccagactggacgcccggccgctaaggagaatctcatgaaatatcaacttactgcccttgaagctcgcgtgattggttgcttgctggaaaagcaggtgaccacgccggagcaatacccgctcagtgtcaatggtgtagtcacggcctgtaatcagaaaacgaaccgtgaaccggtcatgaatctgagtgaatccgaagtgcaggaacagctggataatctggtcaaacgtcattatctacgcacagtgagcggttttggtaatcgggtcaccaaatatgagcaacgtttttgtaatagtgaatttggcgatctgaaactgagcgcagcggaagtggcgttaatcaccacgttgttattgcgtggtgcccagacgccaggtgaactgcgcagccgcgccgcgcgaatgtatgaattcagcgatatggcggaagtggagagcacgctggaacaactggcaaatcgcgaagatggtccttttgtggtgcgtctggcccgcgaaccgggtaaacgcgaaaaccgctacatgcatcttttcagtggtgaggttgaagatcagccggcggtgacggatatgagcaacgcggttgacggtgatttacaggcccgcgtcgaagccctggaaatcgaagtggcagaactgaaacagcgtcttgatagcttgctggcccatctgggagattaaagtgaaaaaattacgtatcggcgtagtgggattaggtggcattgcgcaaaaagcgtggttaccggtgctggcggcagcgtctgactggacgttacaaggagcctggagccctacgcgcgcgaaagccctgccaatttgtgaaagctggcgcattccttatgccgatagcttatccagccttgccgccagttgcgatgcggtttttgtgcattccagcaccgccagccactttgacgtggtcagtacgttactcaatgcgggggtacatgtctgtgtcgataaaccgctggcagaaaatctgcgcgatgctgaacggctggtggaactggcggcgcggaaaaaactgacgttgatggtcggttttaaccgtcgtttcgcaccactctacggtgagttaaaaacgcaactcgccaccgcagccagcctaagaatggataaacatcgtagcaatagcgtcgggccacacgatctttatttcacgttgctggatgattatctgcatgtggtggataccgcgctgtggttgagcggcggcaaagcctctctggatggcggtacgctactgactaacgacgctggcgaaatgctgtttgccgagcaccattttagcgctggtcctttgcagatcaccacctgtatgcatcgccgtgccggaagtcagcgtgaaaccgtgcaggccgtgactgacggtgcgctcatcgacattacggatatgcgcgaatggcgtgaggagcgcgggcagggcgtagtgcataaaccgattcctggttggcagagtacgcttgagcaacgtgggtttgtcggctgtgcgcggcacttcattgaatgtgtgcaaaaccagacagttccgcaaaccgccggcgaacaggccgtgctggcgcaacgtatcgttgacaagatctggcgcgatgcgatgagtgaataaaccctgtaacatctggcggtagcaattcaccataatccaggtagactattcgcctctttcagcgcctgccttgcaggcgttttgcccgtgggtctggattagaacaccgatgaatttattaaaaagcctggccgccgtcagcagcatgaccatgtttagccgtgtgcttggcttcgcacgagacgcaattgtcgccagaatctttggcgcagggatggcaaccgacgcctttttcgtcgcttttaaacttcctaacttgttacgccgtatctttgccgaaggggcattttcccaggcatttgtaccgattctggcggaatataaaagtaagcagggtgaagacgccacgcgggtctttgtctcttatgtttctggcctgctgacacttgcgctggcggttgtgacggtcgctggcatgctcgccgcaccgtgggtgatcatggtgaccgcgccaggcttcgctgacacagctgacaaatttgccctgaccagccagctactaaagattacctttccctatatcttgctgatctccctggcgagcctggtgggagcgattctgaatacgtggaaccgcttcagcattccggcgtttgctccaacactgcttaacatcagcatgattggtttcgcgctgtttgccgcaccgtactttaacccaccggtgctggcgctggcgtgggctgttacggtcggcggcgtcctgcagctggtgtatcagctaccgcacctgaagaagatcggcatgctggtcctgccgcgcattaacttccacgatgccggagcaatgcgcgtggtgaaacagatgggaccggcgatccttggcgtctctgtgagccagatctccttaatcatcaacaccatttttgccagctttcttgcttccggtagcgtgtcttggatgtattacgccgaccgcttaatggagtttccgtccggtgtgctgggcgtggcgcttggcaccattttgctgccgagcctgagcaaaagttttgccagtggcaatcatgatgaatacaaccgtttgatggactgggggttgcgtctttgtttcctgttggcgctgccgagtgcggttgcgttgggcattctttccggtccgttgaccgttagcctgttccagtacggtaaatttaccgcgtttgatgcgctgatgacccagcgggcgttaattgcctacagcgtgggtttgattggcctgattgtagtgaaagtgttggctcctggcttttattcccgccaggacattaaaacgccagtgaaaattgccatcgttacgctgattttaacgcaattgatgaacctggcgtttattggtccgttgaaacatgccgggctgagtctttctattggtctggcggcgtgtctgaatgctagcctgctttactggcagttgcgtaagcagaaaatctttaccccgcaacccggctggatggcgtttctgttgcgtctggtggtggcggtactggtgatgtctggcgtgcttttaggtatgttacatatcatgccggagtggagtttgggtaccatgccctggcgtttactgcgtttaatggcggtcgtgctggcggggattgccgcgtacttcgctgcactggcggtactgggcttcaaagttaaagaatttgcccgccggacggtgtaacaatgcattccggcctgcagtgttcgctttaaaacatatcatgaaactgggtatgttttgtctgcctgctctgggatcgctggggcgggcatttttttgcctattttgcattgttggttagcaaggatgccattcgatgaattttaatatgttgattcaaagatgaaataaaaaagccctggcagttaccagggcttgattactttgagctaattattactcaacaggttgcggacgcgcaggagcggcagaggcatgatgtgttgccgtatgaccacctgcggcacctttaccttcgaaggcaaaagtagggcgctgccagtcactgtgacgcggtgcctccggaacatattccggtgctggagcgcgcgtcattggcgcggtagcgtggttatgctcaacggtgacctcaggttcgaccgcagctaccgtttcaacttctgctgcgacttcagcgactactggcgcggcaggttgagcaacaacttcaggttcagcaactacaacctcagcagtttcgacaacttcttcaatatctgccgtctcttcctgcggttcaaccaccggttctgcttgttctgcaacttcctgggctacggcaacatcagactcggtaatcacctgcggctgttcagttaccgcggcagcgatcacttcaggatgcgtcgtttcaaccacttccggttgcggttcggcaacctgaacgggggcttctacgacaccggccacttcttcaacaactggcgcgctaacaaccggttcgatagcggcggcgacagggacctcagtcaccatcggctgcacatgtacttcttcctgttcgcgctgctcttcaacctgtacatcttgcggacgtacaattggatagcggatccagactttgccagaggccagttccggagacgcgcacgctacggtcaacggcattgggctctgggttggataacgctcgtcacgatagcgacgacgacgctgaccacttacgcgcaggtgacgagggctgcggcgagaacgacgcggcatgccaccgttgtcacggttatcagcattgttctcttcttgctgttctggtgcagtttgcgctacgactggcagcgggactttcaccagttctgtgcgtggagctggcgcttcctgaacaattggttcggcagcgacagtttcttcaaccaccggtgcgactaccgcttcttcggctacgctttgctcgtaacgcactttctgattgagctgacgctgtttacgacgcggctgaaccggacgtacacgttcttcctgttcggtttcctgaacagattgctcttcaacattcagcgccttcgcttcttgttgcgcctgacgtttatcatcattacggcggcggctacgttcacgacgcggcgcttgctgctcgtcggcggtacgcgctttttccgttacctcagcctgctgacggctctcacgcgtctcggcagtctgctgctgtgcctggcgacgattacgacggttttcttcgcgattatcgctgccttcagtacgttcactacgggtgtcgcggcgctcattacggtcacggcggttgttctgacgaggcttgcgacgatcctgttgacgttccggtttcgcttctgctttcggtgctggttgctcggtcggtttggtttcttcaccaccgctgaacagcgctttcagtgcgccgaagaagcggctcaacagcccaggttgtgcaggagctgctggtgttgccggtgcagctttcggtgctggagctacaacaggcgcggcaggttcagctggcgttggcgcaggcggcacatccggcatggcaaaggttgccagcgcaggttgttccggacgcttacgttcagcgaactcttcttcagacggcagcgccatcgcttcttcatgcagcttcggcagcatgtagcttaaggttggggtttcttcccctttacgcacgcgcagcacgtggtagtgcggggtttccatctgatcgtttggcacaattacacagcgcacaccgtcctgacgagtttcaatggcatttaccgcagaacgtttttcattcagcaggtaagaagcgattggcacaggaacaatggcgtgaacttcctgggtgttctctttcagcgcttcttcttcgatcagacgcagaatagagaggctcaggctttcgttgtcacgcacggtgccagtaccagaacaacgcggacaaacgtgatgactggattcacccagacttgggctcaggcgctgacgggacatttccagcaggccaaagcgagaaatatggctgatttgaatacgcgcacggtcctgacgcaccgcttcacgcagacggttttctaccgcacgctggtggcgtactggcgtcatgtcgatgaagtcgataacaatcaggccgccgaggtcacgcaggcgcagctgacgagcaatctcatcggcagcttcgaggttagtgttaaacgcggtttcttcgatatcgccgccgcgggtcgcgcgtgcggagttgatgtcgatggccgttaacgcttcggtgctgtcgataacaatggaaccaccagacggcagacgaacttcacgctggaaggcggactcgatctgactctcgatctggtagtggctgaacagcgggatctcgccggtgtacagtttgattttgctgctgaaatccgggcgacctaatgcagcgatatgctgacgtgccagttcgagcactttcgggttatcgataaggatttcgccgatgtcctgacgtaagtaatcgcggaatgcgcgaacgattacgttgctctcctgatgaatcaggaacggggccgggcggctttcagcggcttttttgatggcttcccagtgtttcagacggaagcttaaatcccattgcagcgcctcagcagatttgccgacgccagcggtgcgcacgataagccccatgccttccggcagttcaaggcttgccagtgcttcttttaattcggtacggtcgtcgccttcgatacggcgagaaatgccacccgcgcgcgggttgttcggcatcagaaccagatagctacccgccagactgataaaggtggttaatgccgcgcctttgttgccgcgctcttctttatcgatctgaacaatgacttcctgaccttcacgcaacacatctttaatgttgggacgaccatgagcactgtagttagcagggaaatattcgcgggcaatttcttttagtgggaggaaaccgtgacgttcagcgccgtaatcaacaaaagcagcttccagactcggttcaatgcgggtgattttacctttgtagatgtttgcctttttctgctcgtgccctggactttcgatatccaggtcatacagacgctgcccatctacaagggcaacgcgcaactcttcctgctgagttgcgttgattaacattcttttcatcgtaacttactcattattcttacattgacgactaagctgcgggcaaagtaacgcctttccgggtgtgaaccgatggcctcgtgtctagtcgcgtcgccaacctcacggttatcgtcagctcaaagaggcgcagagtgtgagttgcccgtttttcatgcggaaaaacagcgcaattatcaaagaaacagactgggtattactctccagaaatatttccatctaccggtaaggactgcaacccgcagcccgctaactgcctgaaagatcaatacgtcttacgccattgctgcgtggatgatcggtcgggcaaaatgggttattccgtaaaatttcttgttttaacaaggatggacacggaaacggcctcattattccactgcaagccttgttatagcaagatgacttttaccatttatcacccgcttactcacagttttttcacttcttgctggtgattggtttaataaccatcaataaagtgatcacgcagtgaagtaataaggtgcaaaagtaaatataagcatagaaaaatgagtggcgcgaatcctgttggctaattagaatcgccaaccatgaaaacagagactccatccgtaaaaattgttgctatcaccgctgacgaagcggggcaacgtatcgataactttttgcgtacccaattgaaaggcgtaccaaaaagtatgatttaccgtattttgcgtaaaggcgaagtgcgggtgaacaaaaaacgtattaagcctgaatataaactcgaagcgggtgatgaggtgcgtattccaccggttcgcgttgctgagcgggaagaagaggcggttagcccacatctgcaaaaggtggcggcgctggcggacgtcatcttatatgaagatgatcacatcctggtgctgaataaaccttccggtacggcggtacatggcggcagtggtttaagcttcggcgttattgaaggtttgcgggcgttgcgcccggaagcgcggttccttgaactggttcatcgtcttgaccgggacaccagtggtgttttgctggtagcgaaaaaacgcagcgcgttgcgttctctgcatgagcaattacgtgaaaaagggatgcaaaaagattacctggcgctggtgcgcggtcagtggcagagccatgtgaagagcgttcaagcaccgttactgaaaaatattctgcaaagcggcgaacgtatcgtgcgtgtgagtcaggaaggcaaaccgagcgaaacacgctttaaagtggaagaacgctatgcatttgccaccctggtgcgttgtagcccggtaacagggcgtactcaccagatccgtgtgcatacacaatatgcgggtcatccgattgcctttgacgatcgctacggtgaccgtgaatttgacaggcagctcactgaagcaggcacgggattaaatcgcctgttcctgcacgctgcagcgttgaagtttactcatccggggaccggtgaggtgatgcgtatcgaagctccgatggatgaaggtttgaagcgttgtttgcaaaagctgcgtaacgcgcgctaatacaagcatataaacctgataatgggcggttggcctgataaggcgtttacgccgcatcaggccgccagcaccgattgccggatgcgacgtaaccacatccggcgcaaaaaattatcccatcagcgggtttttcccttcccgacgtaacatctgacacagcgcgattagcggtaaaccaaccagcgtgttaggatcacgcccctctaaacgctcaaacagcgtaatgccaaatccttcactcttaaagctacccgcgcagtgcaggggatgctctttacgcacgtaattatcaatctccgcctcgctcaggtgacggaaatggacgtcaaaaggctccacttctgtttgcagatgcccattcgcgctattaaacaacgccagtccagtatagaaggtgacgatattgccgctggctttgcgtaattgcagacgggcattttcttccgttaacggtttaccggtgatttcgccatcaagaacacatacctggtcactaccaataattaaatgatccggataacgactcgccagagattgcgctttttcttgtgccagtcgaagcaccaactgtcgcggactttcgtcgctgcgtggggtttcgtcgacctctggtgctgcacattcaaaagagatttgcagtttttccagaagagcgcgacgccatgggctggtggaggctaaaataagtttaggcatatttttttccatcagatatagcgtattgatgatagccattttaaactatgcgcttcgttttgcaggttgatgtttgttatcagcactgaacgaaaataaagcagtaacccgcaatgtgtgcgaattattggcaaaaggcaaccacaggctgcctttttctttgactctatgacgttacaaagttaatatgcgcgccctatgcaaaaggtaaaattacccctgactctcgatccggttcgtacggctcaaaaacgccttgattaccagggtatctatacccctgatcaggttgagcgcgtcgccgaatccgtagtcagtgtggacagtgatgtggaatgctccatgagcttcgctatcgataaccaacgtctcgcagtgttaaacggcgatgcgaaggtgacggtaacgctcgagtgtcagcgttgcgggaagccgtttactcatcaggtctacacaacgtattgttttagtcctgtgcgtagtgacgaacaggctgaagcactgccggaagcgtatgaaccgattgaggttaacgaattcggtgaaatcgatctgcttgcaatggttgaagatgaaatcatcctcgccttgccggtagttccggtgcatgattctgaacactgtgaagtgtccgaagcggacatggtctttggtgaactgcctgaagaagcgcaaaagccaaacccatttgccgtattagccagcttaaagcgtaagtaattggtgctccccgttggatcggggataaaccgtaattgaggagtaaggtccatggccgtacaacagaataaaccaacccgttccaaacgtggcatgcgtcgttcccatgacgcgctgaccgcagtcaccagcctgtctgtagacaaaacttctggtgaaaaacacctgcgtcaccacatcactgccgacggttactaccgcggccgcaaggtcatcgctaagtaatcacgcatctgcgtgatgaagcttagtgaggattttccccaggcaactggggaaagaccaaaccgggcggcgacgataccttgacacgtctaaccctggcgttagatgtcatgggaggggattttggcccttccgtgacagtgcctgcagcattgcaggcactgaattctaatagccaactcactcttcttttagtcggcaattccgacgccatcacgccattacttgctaaagctgactttgaacaacgtagccgtctgcagattattcctgcgcagagtgttatcgccagtgatgcccggcctagccaagctatccgcgccagtcgtgggagtagtatgcgcgtggccctggagctggtgaaagaaggtcgagcgcaagcctgtgtcagtgccggtaataccggggcgctgatggggctggcaaaattattactcaagcccctggaggggattgagcgtccggcgctggtgacggtattaccacatcagcaaaagggcaaaacggtggtccttgacttaggggccaacgtcgattgtgacagcacaatgctggtgcaatttgccattatgggcagtgttctggctgaagaggtggtggaaattcccaatcctcgcgtggcgttgctcaatattggtgaagaagaagtaaagggtctcgacagtattcgggatgccagtgcggtgcttaaaacaatcccttctatcaattatatcggctatcttgaagccaatgagttgttaactggcaagacagatgtgctggtttgtgacggctttacaggaaatgtcacattaaagacgatggaaggtgttgtcaggatgttcctttctctgctgaaatctcagggtgaagggaaaaaacggagctggtggctactgttattaaagcgttggctacaaaagagcctgacgaggcgattcagtcacctcaaccccgaccagtataacggcgcctgtctgttaggattgcgcggcacggtgataaaaagtcatggtgcagccaatcagcgagcttttgcggtcgcgattgaacaggcagtgcaggcggtgcagcgacaagttcctcagcgaattgccgctcgcctggaatctgtatacccagctggttttgagctgctggacggtggcaaaagcggaactctgcggtaacaggacgctgccagcgaactcgcagtttgcaagtgacggtatataaccgaaaagtgactgagcgtacatgtatacgaagattattggtactggcagctatctgcccgaacaagtgcggacaaacgccgatttggaaaaaatggtggacacctctgacgagtggattgtcactcgtaccggtatccgcgaacgccacattgccgcgccaaacgaaaccgttagtaccatgggctttgaagcggcgacacgcgcaattgagatggcgggcattgagaaagaccagattggcctgatcgttgtggcaacgacttctgctacgcacgctttcccgagcgcagcttgtcagattcaaagcatgttgggcattaaaggttgcccggcatttgacgttgcagcagcctgcgcaggtttcacctatgcattaagcgtagccgatcaatacgtgaaatctggggcggtgaagtatgctctggtcgtcggttccgatgtactggcgcgcacctgcgatccaaccgatcgtgggactattattatttttggcgatggcgcgggcgctgcggtgctggctgcctctgaagagccgggaatcatttccacccatctgcatgccgacggtagttatggtgaattgctgacgctgccaaacgccgaccgcgtgaatccagagaatagtattcatctgacgatggcgggcaacgaagtcttcaaggttgcggtaacggaactggcgcacatcgttgatgagacgctggcggcgaataatcttgaccgttctcaactggactggctggttccgcatcaggctaacctgcgtattatcagtgcaacggcgaaaaaactcggtatgtctatggataatgtcgtggtgacgctggatcgccacggtaatacctctgcggcctctgtcccgtgcgcgctggatgaagctgtacgcgacgggcgcattaagccggggcagttggttctgcttgaagcctttggcggtggattcacctggggctccgcgctggttcgtttctaagataaggattaaaacatgacgcaatttgcatttgtgttccctggacagggttctcaaaccgttggaatgctggctgatatggcggcgagctatccaattgtcgaagaaacgtttgctgaagcttctgcggcgctgggctacgacctgtgggcgctgacccagcaggggccagctgaagaactgaataaaacctggcaaactcagcctgcgctgttgactgcatctgttgcgctgtatcgcgtatggcagcagcagggcggtaaagcaccggcaatgatggccggtcacagcctgggggaatactccgcgctggtttgcgctggtgtgattgatttcgctgatgcggtgcgtctggttgagatgcgcggcaagttcatgcaagaagccgtaccggaaggcacgggcgctatggcggcaatcatcggtctggatgatgcgtctattgcgaaagcgtgtgaagaagctgcagaaggtcaggtcgtttctccggtaaactttaactctccgggacaggtggttattgccggtcataaagaagcggttgagcgtgctggcgctgcctgtaaagcggcgggcgcaaaacgcgcgctgccgttaccagtgagcgtaccgtctcactgtgcgctgatgaaaccagcagccgacaaactggcagtagaattagcgaaaatcacctttaacgcaccaacagttcctgttgtgaataacgttgatgtgaaatgcgaaaccaatggtgatgccatccgtgacgcactggtacgtcagttgtataacccggttcagtggacgaagtctgttgagtacatggcagcgcaaggcgtagaacatctctatgaagtcggcccgggcaaagtgcttactggcctgacgaaacgcattgtcgacaccctgaccgccagcgcgctgaacgaacctagtgcgatggcagcggcgctcgagctttaaaagaggaaaatcatgaattttgaaggaaaaatcgcactggtaaccggtgcaagccgcggaattggccgcgcaattgctgaaacgctcgcagcccgtggcgcgaaagttattggcactgcgaccagtgaaaatggcgctcaggcgatcagtgattatttaggtgccaacggcaaaggtctgatgttgaatgtgaccgacccggcatctatcgaatctgttctggaaaaaattcgcgcagaatttggtgaagtggatatcctggtcaataatgccggtatcactcgtgataacctgttaatgcgaatgaaagatgaagagtggaacgatattatcgaaaccaaccttagttctgttttccgtctgagtaaagcggtaatgcgcgctatgatgaaaaagcgtcatggtcgtattatcactatcggttctgtggttggtaccatgggaaatggcggtcaggccaactacgctgcggcgaaagcgggcttgatcggcttcagtaaaagtctggcgcgcgaagttgcgagtcgcggtattactgtaaacgttgttgctccgggctttattgaaacggacatgacacgtgcgctgagcgatgaccagcgtgcgggtatcctggcgcaggttcctgcgggtcgcctcggcggcgcacaggaaatcgccaacgcggttgcattcctggcatccgacgaagcagcttacatcacgggtgaaactttgcatgtgaacggcgggatgtacatggtctgaccgcgatttgcacaaaatgctcatgttgcgcgcagtctgcgtggttatgagtaataattagtgcaaaatgatttgcgttattggggggtaaggcctcaaaataacgtaaaatcgtggtaagacctgccgggatttagttgcaaatttttcaacattttatacactacgaaaaccatcgcgaaagcgagttttgataggaaatttaagagtatgagcactatcgaagaacgcgttaagaaaattatcggcgaacagctgggcgttaagcaggaagaagttaccaacaatgcttctttcgttgaagacctgggcgcggattctcttgacaccgttgagctggtaatggctctggaagaagagtttgatactgagattccggacgaagaagctgagaaaatcaccaccgttcaggctgccattgattacatcaacggccaccaggcgtaagtgaacatctccaggcggtcgttcgaccgcctgagttttatctttttgtcccactagaatcattttttccctccctggaggacaaacgtgtctaagcgtcgtgtagttgtgaccggactgggcatgttgtctcctgtcggcaataccgtagagtctacctggaaagctctgcttgccggtcagagtggcatcagcctaatcgaccatttcgatactagcgcctatgcaacgaaatttgctggcttagtaaaggattttaactgtgaggacattatcagccgcaaagaacagcgcaagatggatgccttcattcaatatggaattgtcgctggcgttcaggccatgcaggattctggccttgaaataacggaagagaacgcaacccgcattggtgccgcaattggctccgggattggcggcctcggactgatcgaagaaaaccacacatctctgatgaacggtggtccacgtaagatcagtccattcttcgttccgagtacgattgtgaacatggtggcaggtcatctgactatcatgtatggcctgcgtggcccgagcatctctatcgcgactgcctgtacttccggcgtgcacaacattggccatgctgcgcgtattatcgcgtatggcgatgctgacgtgatggttgcaggtggcgcagagaaagccagtacgccgctgggcgttggtggttttggcgcggcacgtgcattatctacccgcaatgataacccgcaagcggcgagccgcccgtgggataaagagcgtgatggtttcgtactgggcgatggtgccggtatgctggtacttgaagagtacgaacacgcgaaaaaacgcggtgcgaaaatttacgctgaactcgtcggctttggtatgagcagcgatgcttatcatatgacgagtccgccagaaaatggcgcaggcgcagctctggcgatggcaaatgctctgcgtgatgcaggcattgaagcgagtcagattggctacgttaacgcgcacggtacttctacgccggctggcgataaagctgaagcgcaggcggtgaaaaccatcttcggtgaagctgcaagccgtgtgttggtaagctccacgaaatctatgaccggtcacctgttaggtgcggcgggtgcagtagaatctatctactccatcctggcgctgcgcgatcaggctgttccgccaaccatcaacctggataacccggatgaaggttgcgatctggatttcgtaccgcacgaagcgcgtcaggttagcggaatggaatacactctgtgtaactccttcggcttcggtggcactaatggttctttgatctttaaaaagatctaagttgtcattttccacccttataaaaggtccgcttgcgggccttttttcttagcttttattccgacttgttccgtagtgaacatgctgccacactaacaattctctgataaggagccggtatgttcttaattaacggtcataagcaggaaagcctggcagtaagcgatcgggcaacgcagtttggtgatggttgttttaccaccgccagagttatcgacggtaaagtcagtttgttaagcgcgcatatccagcgactacaggatgcttgtcagcggttgatgatttcctgtgacttctggcctcagcttgaacaagagatgaaaacgctggcagcagaacagcaaaatggtgtgctgaaagtcgtgatcagtcgcggtagtggcgggcgagggtacagcacattgaacagcggaccggcaacgcggattctctccgttacggcttatcctgcacattacgaccgtttgcgtaacgaggggattacgttggcgctaagcccggtgcggctggggcgcaatcctcatcttgcaggtattaaacatctcaatcgtcttgagcaagtattgattcgctctcatcttgagcagacaaacgctgatgaggcgctggtccttgacagcgaagggtgggttacggaatgctgtgcggctaatttgttctggcggaagggcaacgtagtttatacgccgcgactggatcaggcaggtgttaacggcattatgcgacaattctgtatccgtttgctggcacaatcctcttatcagcttgtcgaagtgcaagcctctctggaagagagcttgcaggcagatgagatggttatttgtaatgcgttaatgccagtgatgcccgtatgtgcctgtggcgatgtctcctttagcagtgcaacgttatatgaatatttagccccactttgtgagcgcccgaattaatcatgaaaaaagtgttattgataatcttgttattgctggtggtactgggtatcgccgctggtgtgggcgtctggaaggttcgccatcttgccgacagcaaattgcttatcaaagaagagacgatatttaccctgaagccagggaccggacgtctggcgctcggtgaacagctttatgccgataagatcatcaatcgtccacgggtttttcaatggctgctgcgtatcgaaccggatctttctcactttaaagccgggacttaccgctttacaccgcagatgaccgtgcgcgagatgctgaaattgctggaaagcggtaaagaagcacagttccctctgcgactggtagaagggatgcgtctgagcgattacctcaagcaattgcgtgaggccccgtatatcaagcatacgctgagcgatgataagtacgccaccgtagcgcaggcacttgaactggaaaacccggagtggattgaaggttggttctggccagacacctggatgtataccgccaataccaccgatgtcgcgttactcaagcgagcgcacaagaaaatggtgaaagcggtcgatagcgcctgggaagggcgtgcggacggtctgccttataaagataaaaaccagttggtgacgatggcaagtattatcgaaaaagaaaccgccgttgccagtgaacgcgataaggttgccagtgtatttatcaaccgtttacgcattggtatgcgcctgcagaccgacccgaccgtgatttacgggatgggagagcgttataatggcaaactttctcgtgcagacctggaaacgccgacagcgtataacacctataccattaccggtctgccgccaggtgcgatagcgacgccgggggcggatagcctgaaggctgctgcgcatccggcaaaaacgccgtatctctattttgtggccgatggtaaaggtggtcacacgtttaataccaatcttgccagtcataacaagtctgtgcaggattatctgaaagtgcttaaggaaaaaaatgcgcagtaagtatatcgtcattgaggggctggaaggcgcaggcaaaactaccgcgcgtaatgtggtggttgagacgctcgagcaactgggtatccgcgacatggttttcactcgggaacctggcggtacgcaacttgccgaaaagttaagaagcctggtgctggatatcaaaagcgtaggcgatgaagtcattaccgataaagccgaagttctgatgttttatgccgcgcgcgttcaactggtagaaacggtcatcaaaccagctctggctaacggcacctgggtgattggcgatcgccacgatctctccactcaggcgtatcagggcggcggacgtggtattgaccaacatatgctggcaacactgcgtgatgctgttctcggggattttcgccccgacttaacgctctatctcgatgttaccccggaagttggcttaaaacgcgcgcgtgcgcgcggcgagctggatcgtattgagcaagaatctttcgatttctttaatcgcacccgcgcccgctatctggaactggcagcacaagataaaagcattcataccattgatgccacccagccgctggaggccgtgatggatgcaatccgcactaccgtgacccactgggtgaaggagttggacgcatgagatggtatccatggttacgacctgatttcgaaaaactggtagccagctatcaggccggaagaggtcaccatgcgctactcattcaggcgttaccgggcatgggcgatgatgctttaatctacgccctgagccgttatttactctgccaacaaccgcagggccacaaaagttgcggtcactgtcgtggatgtcagttgatgcaggctggcacgcatcccgattactacaccctggctcccgaaaaaggaaaaaatacgctgggcgttgatgcggtacgtgaggtcaccgaaaagctgaatgagcacgcacgcttaggtggtgcgaaagtcgtttgggtaaccgatgctgccttactaaccgacgccgcggctaacgcattgctgaaaacgcttgaagagccaccagcagaaacttggtttttcctggctacccgcgagcctgaacgtttactggcaacattacgtagtcgttgtcggttacattaccttgcgccgccgccggaacagtacgccgtgacctggcttagtcgcgaagtgacaatgagtcaggatgcattacttgccgcattgcgcttaagcgccggtagccctggcgcggcactggcgttgtttcagggagataactggcaggctcgtgaaacattgtgtcaggcgttggcatatagcgtgccaagcggcgactggtatagcctgctagcggcccttaatcatgaacaagctccggcgcgtttacactggctggcaacgttgctgatggatgcgctaaaacgccatcatggtgctgcgcaggtgaccaatgttgatgtgccgggcctggtcgccgaactggcaaaccatctttctcccagccgcctgcaggctatactgggggatgtttgccacattcgtgaacagttaatgtctgttacaggcatcaaccgcgagcttctcatcaccgatcttttactgcgtattgagcattacctgcaaccgggcgttgtgctaccggttcctcatctttaagagagacatcatgtttttagtcgacagtcactgccatctcgatggtctggattatgaatctttgcataaggacgtggatgacgttctggcgaaagccgccgcacgcgatgtgaaattttgtctggcagtcgccacaacattaccgggttatttacatatgcgggatctggtaggcgaacgtgacaacgtcgtattttcttgtggcgtgcatccactcaaccagaatgatccctacgatgtagaagatttacgccgtctggcggcagaagagggtgttgtagcgctgggtgaaaccgggctggattattattacacgccggaaactaaagtacgtcagcaagagtccttcatccatcatatccagattggtcgtgaactgaacaagccggttatcgtccatacccgtgacgcccgtgccgatacgctggcaattctgcgcgaagaaaaagtgacggattgcggtggcgtactacactgttttacagaggacagagaaacggcgggtaaattactggatctcggattttacatctccttttccggcattgtgaccttccgtaatgcggagcaactgcgcgatgctgcgcgttatgtccccctggatcggttactggtggaaactgacagtccttaccttgcgccggtaccgcatcgaggaaaagagaatcaacctgcgatggttcgtgacgttgcagaatacatggctgtgttgaaaggtgttgccgttgaagaactggcgcaggtaaccaccgataacttcgcccgtctgtttcacatcgacgcttcccgccttcaatccatccgttgaatgagtttttttaaagctcgtaattaatggctaaaacgagtaaagttcaccgccgaaaattgggcggtgaataaccacgtttgaaatattgtgacatatgttttgtcaaaatgtgcaacttctccaatgatctgaagttgaaacgtgatagccgtcaaacaaattggcactgaattattttactctgtgtaataaataaagggcgcttagatgccctgtacacggcgaggctctccccccttgccacgcgtgagaacgtaaaaaaagcacccatactcaggagcactctcaattatgtttaagaatgcatttgctaacctgcaaaaggtcggtaaaagcctgatgctgccggtatccgtactgcctatcgcaggtattctgctgggcgtcggttccgcgaatttcagctggctgcccgccgttgtaagccatgttatggcagaagcaggcggttccgtctttgcaaacatgccactgatttttgcgatcggtgtcgccctcggctttaccaataacgatggcgtatccgcgctggccgcagttgttgcctatggcatcatggttaaaaccatggccgtggttgcgccactggtactgcatttacctgctgaagaaatcgcctctaaacacctggcggatactggcgtactcggagggattatctccggtgcgatcgcagcgtacatgtttaaccgtttctaccgtattaagctgcctgagtatcttggcttctttgccggtaaacgctttgtgccgatcatttctggcctggctgccatctttactggcgttgtgctgtccttcatttggccgccgattggttctgcaatccagaccttctctcagtgggctgcttaccagaacccggtagttgcgtttggcatttacggtttcatcgaacgttgcctggtaccgtttggtctgcaccacatctggaacgtacctttccagatgcagattggtgaatacaccaacgcagcaggtcaggttttccacggcgacattccgcgttatatggcgggtgacccgactgcgggtaaactgtctggtggcttcctgttcaaaatgtacggtctgccagctgccgcaattgctatctggcactctgctaaaccagaaaaccgcgcgaaagtgggcggtattatgatctccgcggcgctgaccagcttcctgaccggtatcaccgagccgatcgagttctccttcatgttcgttgcgccgatcctgtacatcatccacgcgattctggcaggcctggcattcccaatctgtattcttctggggatgcgtgacggtacgagcttcagccacggtctgatcgacttcatcgttctgtctggtaacagcagcaaactgtggctgttcccgatcgtcggtatcggttatgcgattgtttactacaccatcttccgcgtgctgattaaagcactggatctgaaaacgccgggtcgtgaagacgcgactgaagatgcaaaagcgacaggtaccagcgaaatggcaccggctctggttgctgcatttggtggtaaagaaaacattactaacctcgacgcatgtattacccgtctgcgcgtcagcgttgctgatgtgtctaaagtggatcaggccggcctgaagaaactgggcgcagcgggcgtagtggttgctggttctggtgttcaggcgattttcggtactaaatccgataacctgaaaaccgagatggatgagtacatccgtaaccactaatccgtaagacgttggggagactaaggcagccagatggctgccttttttacaggtgttattcagaattgatacgtgccggtaatgctgaaattacgcggtgtgccgtagacgatagaaccttccacgttggtatcgtaggttttgtcgaacaggttattgacgttcccctgtaagctgaagtttttcgtcacctggtagcgggtgaagagatccaccagcgcgtagctaccttgctcggcgcggaaggtgccatacggcgtcacggtgtcggtatacacgcgattttgccagttaacaccaccgccgaccgtcaactctggcatgacaggcaaccgatagctggtgaacattttaaccgtggtgcgtggcagattaggattaacggcgtttccttcgttatcctctgcaatatagcgcgttgcgccaaatgtcagctgccagttgtcggtaattgcgccgttgagttcaaattccacccctttactgactgtcccatccaccgctttataggcggtttcgccgttgctgccggggataggtgtaccggtggactgagcgacattatcctgctcaatacggaagatggctaacgtggtggtcagacggctattcatccagtcgcttttcagacccagctcgtagttgttaccggtgattggagccagatatttgccactactgtcacgatcattttgcggctggaaaatagaggtatagctggcgtaggtgctccagttgtcattgatgtcaaacaccagaccagcgtaaggcgtggtgtggtttttctccatgctgtaagtcagcgtatcaacccgccagttggtataacgtgcgccgaggatcagatgcagcggatcggcaagggtgacacgagtggcagcatataagcttttcatatgtgtggtatcgtcctgcgccaggctctgtggactccagtcggtttgtgggaaattgccattaaagttgtagaaactgccaatttcatccgggaagatgttggcccaactactgaagtaacgattgttttgtttgctgtaactgccaccaaacattagattgtgctgacgaccaaacaattcataactaccgtcagcgaacaaatccagcgcatcaactttacgtttgccactgttccaaccggtgccgccgacataatcaaagccaggtccataattactgtatggcccaaccagcataccatccgctttgtttacataggcatcgacatacatcattttgctgtcaaattcgacttcagagtgggtggcattcagtgtcgcttgccaggtatcagcaaactgctgcttcagggtcataaagaccttgttgatctctttatcgttgtacgcccagtcaggtgcggtactgcgtgcgcgatcgtaactgttgctgctgccatcagtattccagcgcggtaaaccgccccaggtagggctattaacatcaatgcgctgatattcgtaaccggcactaagcgtcgtaagatcgcctaaatcagcatcgacaatgccgctgaagaaggtcttttcactgttgtagcggtccagccaactgtcgttattctggtagccgccgacaattcgcgcgcggattttaccgtcttcggtgagtgggctttgtaaatccgccacataccgttctttgttccagctaccgtattccgcgctgacatcgcctttaaattcacgactggtcgcgtgttttcgaaccatattaattgccgcagatggattacccgtcccggtcatgagtcctgtcgcgccacgcactacttctacgcgttcaaagagtgccatatcagaaagtgcgtcgcccagattccagcggctttcaaaataggtggggataccatcaaccatatagttatcgatctggaatccgcgggaataataaagagcacgatcggaatccgcctgacttttgctgatccccagcgtgttttccatcacttcgcccagcgtttgtaactgctgatcttccatccgctgctggctaacaatagtgacgctctgaggaatatcacgttgagtcatctgcattttggtacccgcagaggtagacgttacgctgtaatcattttcgccatcatctggagctgtggcactaccctcaacaatcaccgtttcttcagtggctggtgcagcaaaagcggcagaaggtaatagtgccagtgctatgcaaccggcaagtagactcggtttggtgatggcttgatattgattatccctgttaaattgtgtactaagcatttgaaatctcttggtttatgttgtcgtcaggctcatgccggaggagggtgatgagcgattatatttagtgtgcgaataattttgtttgtaaatgcaaatgagaaatatacgcattcatatttgtcatgtaaaccaaacagagaatgtcttttcagcgcattcgcaggcagaaatgggaataatggcgatatatacggcagcaaaacgattttttgcttaagaaatcgtgagttaaggttgaaagagcaggtttaactcgaccatactctatactcgcagtgtggcgcggcgtagcatggcgcaacgcatggctatttgaaaaaggaaaatgtcgtggcagaagaaactatattcagcaaaattattcgtcgtgagatcccctccgatatcgtctaccaggatgatctggtaacggcgtttcgcgatattagcccgcaagcgccaacgcatattctgatcattccgaatatcctcattccgactgtgaacgacgtcagtgctgagcatgagcaggcgctgggacgcatgatcaccgtagcggcaaaaattgctgagcaagaaggtattgccgaagatggctatcgtctgatcatgaataccaaccgccatggcggacaagaggtttaccacatccatatgcacttgttgggtggccgtccgctgggaccaatgctggcgcataaaggtctgtaacgatgagaaaaggatgctttgggctggtgtctctggtgttgttactgctggtgggctgtcgtagtcatccggaaattccggtgaatgatgagcaaagcctggtgatggagagttctttattggctgcgggcatcagtgcagaaaagcccttccttagcacgtctgatattcaacctagtgcatccagtacgctttataacgaaaggcaagaacccgttaccgttcattatcgtttttactggtatgacgccagagggctggagatgcatcctctggaaaggccacgcagcgttaccattcccgcacatagcgcggtaacgctgtacggcagcgccaattttctgggggcgcacaaagtcagactttatctatatttgtaaggggtgaatcttgatgacaaaaatgagtcgctacgccttgattaccgcgctggcgatgtttctcgccgggtgtgtggggcaacgtgaacctgcaccggtagaagaagtgaaaccagcgccggaacaaccagccgagccacaacagcctgtccccacagtgcccagcgtgccgacgatcccgcagcagccaggcccaattgagcacgaagatcaaactgcaccgcctgcgccgcatattcgccattatgactggaatggcacaatgcagccgatggtcagtaagatgcttggggctgacggggtgactgcgggtagcgtcctgctggttgatagcgttaacaaccgtactaacggtagcctgaatgccgcagaagcgaccgaaacgctgcgaaatgcgctggctaataacgggaaatttaccctggtttccgcccagcaactgagcatggcgaagcaacagttaggtttgagcccgcaggacagtttaggcacccgtagtaaagccataggcattgcccgcaatgtcggcgctcattacgtgctgtactccagcgcctctggcaacgttaacgctccgaccctacaaatgcagctgatgctggtgcagacgggcgaaattatctggagtggtaaaggtgccgttagccagcaataagtaaaattatctggtcaggtaaaggtgccgtttcgcagcaataatcccatcacgcgcgacgaattgctgagccgctttttcccgcagtatcatcccgtcacgacgtttaatagtgggcttagtggcgggagttttctcattgaacatcagggccagcgttttgttgtgcgtcagccgcacgatcctgatgcgccgcagtccgcgttcttgcgccagtatcgggctttaagtcaactacccgcatgcattgcaccgaagccgcatttatatctccgtgactggatggtagtcgactatctgcccggcgcggtaaaaacgtatttgccggataccaacgaactggcaggcttgctgtattatctacatcaacaaccacgttttggctggcgaataacgctgttgccgttactggaactgtactggcagcaaagcgatccggcgcggcggacagtgggttggctgcgaatgttaaaacgtctgcgcaaagcgcgggaaccacggcctttacgcttaagtccattgcatatggatgtccacgccggaaatttagtgcatagcgcgagtgggttaaaactcatcgactgggagtatgccggagatggtgatatcgcgctggaactggcggcggtgtgggtggaaaatactgaacagcaccggcaattggtcaatgactatgccactcgcgcgaagatttatccggcgcaattatggcgtcaggtcaggcgatggtttccctggctgctgatgctcaaagcagggtggtttgagtaccgctggcgacaaaccggcgatcaacaatttatcaggctggccgatgacacctggcggcagctattaataaaacaataaggagagcagtgtgggtccagtaatgttggatgtcgaaggttacgaactggacgcggaagagcgtgaaatactggcgcatccgctggtgggagggctgattctctttacgcgtaactatcatgatcctgcccagttacgtgaactggtgcgccagatccgcgcagctagccgcaatcgtctggtggtggcggttgatcaggaaggtggacgcgtgcagcgttttcgtgaaggttttacccgcttgccagcggcgcaaagtttcgctgcgctgagtggaatggaagagggtggcaaactggcgcaggaggcaggttggttgatggccagcgaaatgatcgctatggatattgatatcagctttgcgcctgtgctggatgtcgggcatatcagcgcggcgattggcgagcgttcttatcatgccgatccacaaaaagccctggcaattgccagccggtttattgatggtatgcatgaagccggaatgaaaacgaccgggaaacacttcccaggacacggtgcagtaacggcagacagtcacaaagaaacaccgtgcgatccacgtccacaagcggagattcgcgctaaagatatgagcgtcttcagttccttaatccgcgaaaataaactcgacgccattatgcctgcgcatgtgatctacagtgatgttgatccgcgtccggcgagcggttctccctactggctgaaaaccgttttgcgtcaggaactgggttttgacggcgtgattttctctgacgatttaagcatggaaggtgccgcgattatgggcagttatgccgaacgcgggcaggctagtctggatgcgggttgcgatatgatcctggtctgcaataatcgtaaaggggccgtcagcgtgttagataatctgagtccgatcaaggcagaacgtgttacacgtttgtatcataaaggtagttttagccgacaggaactgatggacagcgctcgctggaaagcgatcagcacccgtctgaatcagttacatgaacgctggcaggaagagaaagcaggtcactaaccctggcttatgtgaggaagcgatgattatctatttacacggttttgactctaacagtccgggtaaccacgagaaagtcttacaattgcagtttattgacccggatgtacgcttgataagctacagtacgcggcatccgaaacatgatatgcagcatctgcttaaagaagtggacaaaatgttgcaactgaacgttgacgagcgtccgctaatttgcggcgttggcttgggcggatactgggcggaacggattggttttctttgcgacatccgccaggtgatcttcaaccctaatttgttcccttatgagaacatggaaggcaagattgatcgcccggaagagtatgccgatattgccactaagtgtgtgaccaacttccgtgagaagaatcgcgatcgttgcctggtgattttgagccgtaatgatgaagcgcttaacagccagcggacatctgaagagttgcatcattattacgagattgtctgggacgaagagcagacgcacaaattcaagaatatctccccgcatttacagcgcattaaagcgttcaaaaccctcgggtaaatgccctcgtcgcatcaggtaaccttgccggtacctgatgcgctccgaattctgtgggtcggataaggcgtccacgccgcatccgacagtcgagcatcaatgcctgatgcgcttcttatcaggcctaccgaacgccctgcatacacccctcactctatatcactctcacaaattcgctcaaataataaacaataaactctgttttttgatctcacccggtaaagtcgcctatcttttcagcaacaaaacttgattaacatcaattttggtatgaccaatgcaccattcatgttattctcaatagcgaagaacattttcattgctgtaacctgttgttaattaagagctatgttaataaccattaattaacaattggttaataaatttaagggggtcacgttgactacgccattgaaaaagattgtgattgtcggcggcggtgctggtgggctggaaatggcaacacagctggggcataagctgggacgcaagaaaaaagccaaaattacgctggtcgatcgtaaccacagccacctgtggaaaccgctgctgcacgaagtggcgactggcagccttgatgaaggcgtcgatgcgttgagctatctggcccatgcgcgcaatcatggtttccagttccagctgggttccgtcattgatattgatcgtgaagcgaaaacaatcactattgcagaactgcgcgacgagaaaggtgaactgctggttccggaacgtaaaatcgcctatgacaccctggtaatggcgctgggtagcacctctaacgatttcaatacgccaggtgtcaaagagaactgcattttcctcgataacccgcaccaggcgcgtcgcttccaccaggagatgctgaatttgttcctgaaatactccgccaacctgggcgcgaatggcaaagtgaacattgcgattgtcggcggcggcgcgacgggtgtagaactctccgctgaattgcacaacgcggtcaagcaactgcacagctacggttacaaaggcctgaccaacgaagccctgaacgtaacgctggtagaagcgggagaacgtattttgcctgcgttaccgccacgtatctctgctgcggcccacaacgagctaacgaaacttggcgttcgcgtgctgacgcaaaccatggtcaccagtgctgatgaaggcggcctgcacactaaagatggcgaatatattgaggctgatctgatggtatgggcagccgggatcaaagcgccagacttcctgaaagatatcggtggtcttgaaactaaccgtatcaaccagctggtggtggaaccgacgctgcaaaccacccgcgatccagacatttacgctattggcgactgcgcgagttgcccgcgtccggaagggggctttgttccgccgcgtgctcaggctgcacaccagatggcgacttgcgcaatgaacaacattctggcgcagatgaacggtaagccgctgaaaaattatcagtataaagatcatggtagcctggtaagcctgagcaacttctccaccgtcggtagcctgatgggtaacctgacgcgcggcagtatgatgattgaaggacgaattgcgcgctttgtatatatcagcctataccgaatgcatcagattgcgctgcatggttactttaaaaccggattaatgatgctggtggggagtattaaccgcgttatccgtccgcgtttgaagttgcattaatcgacgtacactggcggatgtggcataaacgcctcatccgcccttgaggaacagcgcgatcggcagccgcgttgtatcaggcatcctttcagactcctccgaatccttaagtatttccagccattcccgcgcttttcatcttctgtctgatagctgcttttctccttcgcttgcatgattggcataactgcaaagaaggaggtgttcccgtgaataaaagtatgttggcgggtatcgggattggtgtcgcagctgcgctgggcgtagcggcagtggccagtctgaacgtgtttgaacggggcccgcaatacgctcaggttgtttctgcaaccccaatcaaggaaacggttaaaacaccgcgtcaggagtgtcgcaacgtcacagtgacccatcgtcgaccggtgcaggatgaaaatcgcattaccgggagcgtgctcggcgctgttgctggcggcgtgatagggcatcagtttggtggtggtcgcggtaaagatgtcgccactgttgtgggggcgctgggtggtggatatgccggtaaccagatccagggctctctccaggaaagcgatacttacacgactacgcaacagcgttgtaaaacggtgtatgacaagagtgaaaaaatgctcggttatgatgtgacctataagattggcgatcagcagggcaaaatccgcatggaccgcgatccgggtacgcagatcccgctagatagcaacgggcaactgattttgaataacaaagtataacaaggctgtactctgcaatttggcccctcattcgctcaggctgaggggctttttttgcgacttatttcaccagttcgggccataaacgcaaagtcgttccggcaatctgcatcagtttttccaggcttgcaccttcgcgtgcgctgatgctcatcccctgaataatacaattaaggaattctgccagatgtgtcacgtcacagtggggcgggatttccccgcgcgcttgtcgttgacataaaaactgctgcaaagtgcgctcttgcatcgcatggcgacttttcaacgtattggcgatatctccactatctggggagagggtggtgcagttgttgatcatgaagcagcctgccggggtgtctttgctggtaaagcagttggcgatggcagcaaaatagtcagccagcgcagactccacgcttttctcttcacaaaacagctgtgcttcatgcttagcggcaaaacgatcgatatagcggtcgagaacggcacgaaataacccctctttgttggtaaattccgcgtatagcgtgggcgctttggctccggtcgcttcgacgaggtccgcaagagaagtcgcttcataaccgtgttgccagaacaatttcatggccttatcaagcgcggcatccctgtcgaacacttttgggcggccacggcttttttttacacattgtgtactgtcagttgccatgatgccgttgtacctggtgactgtgaatgaaaggttattataaaaataatcacctccgttcaccagtccagatcccataaaaataattgctttctatttaactgaaatttaaagatttttaaattaattaatgattgttataaaaaatatcttgtatgtgatccagatcacatctatcatttagttatcgatcgttaagtaattgcttgcgacgtcattcatctgcataaggccactattatgaaaaacgtaaaaaccctcatcgctgcggcgattttaagctccatgagttttgccagctttgcggctgtcgaagttcagagtacgccagaaggccaacaaaaagtcggtacaatcagtgctaacgcggggacaaatctgggaagcctggaagagcagctggcgcaaaaagcggatgagatgggcgcaaaatctttccgtattacttctgtaaccggtccgaataccctccatggaacagcagtaatttataaataagcattaaccctcattaatgcctgctactgctgattttttccccgcgacatgccgtgtcgcggggatttttttatccgggctttacagcgtttgtgggctcacttgatgacggcggacatccaccggcatcccggaacggacatccatcacatgttgcatcacttcagcgtcagtttgtgctgcatctttaaaactttgcattgcgctattcagcgtaattggcagcagctgcggatcgtcatcaatcttctcactcagcggctgatgtacttcaaccagacgcgcaccgtttggttcggcagagacttttatcggagtgttgatgatattcactttggtgcctggggtgacctggctaaagagtgttttgatatcgtcatcccgcagacgaatacagccagaacttacccgcatgccaatgccgaaatcggcgttcgtaccatgaagcaaataaacgccgccataggccgccagacgaatcgcatgatggcccattgggttatccagtccagccggcactaccgcaggcaactcaattccctgtgctttataacgggcgcggatgtttgccgttggcgtccaggttgggtttgcacgtttgtcactaacggtggtcaccattgtcggtgtcagcgtgtcaccacctaactgaccaatacctattggatacacggttacgctatttttacccggcgggtagtaatagagacgcagctccgcaatgttgatcacaatgccttcgcgcggcgcatctggaagtagggtttgcaacgggatcgttaacacgctgcccgcgcgcggtacgtaaggatcaacgccggggttagcctgtaacagagcgagaaagccgacgttgtattttttggcgatggcttccagagaaccaccgtcattttccaccacatgaaatttgttttcgccaaccagacgactgcccgctggcggcagcggccaggtgttggcttttgccggtagcgccagcgccacggcagcggcgaacgtaaaaaacgttagccagcgagaaaaacgcgttttgatcatcaccaaaaatccataataaatataaggttattgtaataaacagataagcctgaattatggatggtgacagtgtcggatagtgcagggaagtgcaaagaatttgtaaatgttgcagatgggggcgcagaaacgcccccgatttaccattaagcgatcgcgttctcttccagttcacgcataaactggcgtacccattcgatacgcgttttccgctcactcaaatcctgaataaatttcaggcgcgtcggaccatcaaggcggtaatgctgcggctgtttttgcagcaaaccaatcaaccaggccggattaacgtgattcttctcggcaaattcgatcaccccgcctttctcattaccttccagcttcctgatccccagtttctgcgcttgctggcgcagacgggcaatatccagcagggtacgcgccggatctggcagcaggccgaagcgatcgataagctcgactttgatctcttccagttcgttttccgttttggcgctggcaatacgtttgtagaagctcagacgcgtgttcacgtcagggatgaaatcatctggcaataggctcggcatccgcagctcgacttctgtttgctggctggtgagatcttccaggctcggctcgcgtccggctttcagtgcatcgacggcgttttccagcaactccatatacaggctgaaaccgatggtttccatactgccgctttgttcttcgccaagcagttcacccgcgccgcgaatctccagatcgtgcgttgccagcgcaaaacctgccccgagatcttccaggctggcaattgcttcaagacgtttttgtgcatcggtagtcatcgcttttggatgcggtgtcagcaaccatgcatatgcctgatgatggctacgtccgacgcgaccgcgtaactggtgcagctgcgccagaccgaagtgatccgcgcgttcaatgataatagtgttggctgtcgggatgtcgatcccggtttcgataatggttgtacaaaccagcacgttgaaacgttgatgatggaaatcattcatcacccgttccagttcgcgctcgcgcatctgcccgtgaccgatggcgatccgcgcttctggcaccagttctgccagccgttcggcggctttctgaatgttttccacatcattgtagagataataaacctgtcctccgcgcaaaatttcacgcaggatcgcctcccggaccaccatgctgtcatactcacggacaaaggttttaactgccagacgacgggcgggcggcgtggcgataatgctcaggtcacgcattccgctcattgccatattcagcgtacgtgggatcggcgttgcagtaagcgtcagaatatccacgttcgcgcgcatcgctttaatgcgctctttatgacgcaccccgaagcggtgttcttcatcgacaatcagcaggcctaaatctttaaacttgacgtcactttgcagcagtttgtgcgtaccgatcagaatatcgattttcccttccgccacttccgcaaggatttgcgtctgctctttggcgctgcggaaacgggagatcatttcgatacgtaccggccagttggcgaaacggtcgcggaagttgtcgtaatgctgctgcgcgagaagggtggtaggcaccagcaccgccacctgcttgtggttatctactgccaggaaagctgcgcgcatcgccacttctgttttaccaaagccaacatcgccgcacaccagacgatccattgccagcggctgacacatgtcgctaagtaccgcattaatggcctgcgcctgatccggcgtggtttcaaacgggaagctgtcgcagaacaactgatactgctcacgatcgtgtttaaacgcgaagccctctttggcggcgcgttgcgcgtagatatccagcaattccgccgccacatcacgcactttttccgccgctttctgccgcgcgcgactccacgcatcgccgccaagtttatgcagcggggcgttttcttccgcgccacctgcgtaacggctaatcagatgcagactgctcaccggaacatacagtttggcgtcgttggcataggtgagcatcagatactcgccagtaatgccacccgcttccagcgtggtcattccggcataacgaccgacgccgtgctccagatggaccaccggctgaccaatatgcagttccgcaaggttacggatcagtgtatcggggttgatggtgcggcgagaatcctgacgacgacgggcaacgcgttcaccgagcagatcgctttcgcaaatcagcgccagattacgcaccgtatcgacaaaaccatgttcggcagcgccaatcatcagataacgcccacggtcgctggcttcatcaagacgcataatgcgttgcggagcaattttaattcgtgcgagcagttcacccagcgcttcacggcgaccttcactttctacgctgaacaccaccggaccgtcgaaagtctcgaggaacttacgcagcgcatccagcggcgctttttgttgtgcctgaacggccaggtctggcagtttctggaaacctaaattggcattcgcggcttttgtcggtaaatgttcagtttttagctgcacccggggccagtttttcagctcactgaagagctcgtccacccgcagccagaggctttgtggtggcaacagcgggcgcatcggatcgacgccgcgattctcaaaacgcgccagcgtgtcagcctggaaacgttcggcactggtttccagatcgccagtattcacgagcaaggtattggcagggaaataactgaacagcggcggcagtggttcgctgaagaacaatggctgccagtactcgatcccggcaggtaatgtgcctttactcacttgctggtaaatatgttctggatcgcgcttcacttcgaaggtatcgcgccactggctgcggaacagttcaattgccgctttatcggtcggaaattcgtgcgcgggcagcagattgatcgcttctacttcctccagcgtgcgctggctgtcgacgtcaaacacccgcaggctgtcgatttcatcatcaaagaaatcaagacgataaggcagctcactccccatcgggaagagatccagcaacgcgccgcgcgtggcgtattcgccgtgctccatcacctggtcaacatggcgataaccggcgctgtccagttgggttcgtaatgcatctcgactcaggcgctgaccttttttcatcaccagcgcatgaccgtggagaaaactgtgtgggcaaacgcgctgcataagcgtattcaccggaacaatcagtacgccacgctgcatcgtcggtagctggtaaagggtggaaaggcggctggagataatgtcctgatgagggctaaaactgtcgtagggaagagtttcccagtccgccagattcatcaccatttgatcggtaaactggctgatttcatcatgcaaacgcagagcattttgcatatctggtgcaatgagtaccaccggaccggcgtgacgttcggcaatttccgctaccagcgttgcacaggctgcgccggttaactcgcccagcagacgctgctcacccgctttgacgggcagcgtataacgatattgttcaggcataacggttgtcagattctcgttaggatatgcctcaacatatgggggcatatctctgataagcaatgctgttcattatccgtaatcgacatggtttagcaaattgaatcgccccggctggggcgatggcttagcgggagtaactgacggcagcgggcagactaggcggggagaacaacagatcgctgaatgcacgctgactaagttttcttaccagcaagcccgcaacagtacagatgaacaaactgacaaagggataaaccagcaggagtgtcagttcgacttgcgggctccagcgtgctgcgttcatttgcgcaagcagagttaagctgaatatttcaaccagaatgcgatgggtggtgtagatagcaatggtgttggagccaatcacattcagcaggctggtggagcgcataccgaatcgttgctcgtattgataaaacagcttcatgatcaccacaatgcttaccaggctcaacagcaggctgatagtaaacaaccaggcaccgaccgccagaacggtaagcaaagaagccatcagcagatggcggcgcaacggcacctctttaacacaggtcattattgttgcgccaaaccatgcgccaaggctgtaataaggcaaattgcggatcacactgttcattccccaccacggcgtgggaacgaaattaaccgccacactcagcagtacaaacaaggcgaatagtggcagcgccagacggctaaaaattttacataccacgaaatagacaattaacgcatacagataccacaagctggtgctggcggtgatcatcccgtgcaggaactcaccggtggaatcggcataagcggcattggaggcattgcttaaatcgcgctcaggtgccagccactggttcagcgcacttaacgccagccactgcaccacgccccaaagcgccagcacccagaagatgttccagatccgtttatcgagacaatttccccacggtacgctgtcgatatagcggcgaatcaaatagccggatataaagaaaaaaaccggcatacgaaagggggcaaggtaaagattgaaatagatccagcatttgctcaggacttcgcttaacggatgctgaaaagtggtcagatgcggataaaaggtaatgacgctgtgataaatcaccaccagacaaatacataaccctttgatctggttaatccatagctctttttgtttcatcaggacaacacgctcttttttaatttacatgcggttgatcctgcgggttatgacccgaggtgtaatgggtatctgtctgtattggatgatttttcagattaagatcaggcggcaagattgatgataaaacatggcaatttagccgattgatttacgggggcttttcagattagccctgacgatcacttacagttcagacgtttacccatcttgctttcgcttatatactcgtgtctttgctacagcaaccagacggatttcatgtaccaacctgtcgctctatttattggcctgcgttacatgcgtgggcgtgcagcggatcgcttcggtcgtttcgtctcctggctttctaccatcggcattaccctcggggtgatggcgctggtcacagtattgagtgtgatgaacggctttgagcgcgagctgcaaaacaacatccttggcctgatgccacaggcaattctctcttctgagcatggctctcttaacccgcagcaactcccagaaacggcagtcaaactggacggcgttaatcgcgtcgcacctattactaccggtgatgtggtactgcaaagcgcgcgcagcgtggcggtcggggtgatgctcggtatcgacccggcgcaaaaagatccacttacaccgtatctggtcaatgtgaaacaaactgacctcgagccggggaaatataatgtcatcctcggcgaacaacttgccagtcagctaggcgttaatcgcggtgatcaaatccgcgtgatggtaccatctgccagccagttcacgccgatggggcgtattccaagccagcgcctgttcaatgtgattggcactttcgccgccaacagtgaagtcgatggctatgaaatgctggtgaatattgaggatgccagccgtctgatgcgttatccggcaggcaatattaccggctggcgtttgtggctggatgagccgctgaaagtcgacagtttaagtcagcaaaaactgcctgaaggcagcaaatggcaggactggcgtgatcgtaaaggcgagttgttccaggccgtacgcatggaaaaaaatatgatgggtttactgctgagcctgattgtcgccgttgcggcgtttaacattattaccagtctagggctgatggtaatggagaagcagggcgaagtagcgatcctgcaaacgcaaggcttaactccgcgacaaatcatgatggtctttatggtgcaaggggccagcgccgggattatcggtgcgatcctcggagcggcgcttggcgccctgcttgccagccagttaaataatctgatgccgataatcggcgtcctgcttgatggcgcggcgctgccggtggctatcgaacctttacaggtcattgttattgcgctggtggcgatggctatcgcgctgctgtctacgctttaccctagttggcgcgctgccgccactcaacccgctgaggctttacgttatgaataagatcctgttgcaatgcgacaacctgtgcaaacgctatcaggaaggcagtgtgcaaaccgatgtgctgcacaatgtcagtttcagcgtcggcgaaggtgaaatgatggcgatcgtcggtagctctggttccggtaaaagtaccttgctgcacctgctgggcgggctggatacgccaacctccggcgatgtgatttttaatggtcagccaatgagcaaactgagcagcgcagcgaaagctgaactgcgcaaccagaagctgggctttatttatcagtttcaccacctgctgccggattttaccgccctggaaaacgtggctatgccgctgctgattggcaagaaaaagcccgctgaaatcaacagccgtgcacttgagatgttaaaagcggtggggctggatcatcgtgcgaatcaccgcccatctgaactttctggcggcgaacgccagcgtgtggcgattgcccgtgcgctggtgaataacccgcgcctggtactggcggatgaacctaccggtaacctcgatgcgcgtaacgccgacagcatcttccagttgcttggggaattgaatcgcttgcagggcaccgccttcctggtggttactcacgacctgcaactggcgaaacgtatgagccgccagttagaaatgcgtgatggtcgtctgacggcggaactgagcctgatgggggcggagtaatggcgatgcctttaagcttattaattggcctgcgttttagtcgcggacggcggcgcggcggcatggtgagcctgatctccgttatttctaccattggcattgccctcggcgtggcggtattgatcgtcggcttaagcgcgatgaacggctttgaacgcgaactgaacaaccgtattctggcggtggtgccgcatggtgaaatcgaggcggtggatcagccgtggactaactggcaggaagcactggatcacgtgcaaaaagtgccgggtattgccgctgccgcgccgtatatcaatttcaccgggctggtggaaagtggcgcgaatcttcgcgcaatccaggtgaagggcgttaacccgcaacaggaacagcgtctgagcgcattacccagctttgtccagggcgatgcgtggcgcaattttaaagcgggcgaacagcaaattatcatcggcaaaggcgtggcggatgcgctgaaagtgaagcagggggattgggtgagcattatgatccccaacagcaatcccgagcataaactgatgcagccaaaacgtgtgcgtttgcacgttgccggtattttgcagttgagtggtcaactcgatcacagttttgccatgatcccgctggcggatgcccaacaatatcttgatatgggttccagcgtgagtggtattgcccttaaaatgacggatgttttcaacgccaataagctggtacgcgatgcgggtgaagtgaccaacagctatgtttatattaaaagctggattggtacttacggctatatgtatcgcgatatccaaatgatccgcgccattatgtatctggcgatggtactggtgattggcgtggcctgtttcaacatcgtctccaccttagtgatggcggtgaaagacaagagtggcgatatcgcagtattaagaacgctgggggcgaaagatggtttaattcgcgccatctttgtctggtatggattgctggcagggctgttcggcagcctgtgtggtgtgattatcggcgtagtggttagtctgcaacttaccccgattattgagtggattgaaaagttgatcggtcatcagttcctctccagcgatatctattttattgatttcctgccaagcgaattgcactggctggacgtcttctacgtactggtcacagcattgttgctgagtcttttggcaagttggtatccggcgcggcgcgccagtaatattgaccctgcgcgagtccttagcggccagtaaaggcagtacattaaaacaaggagcggcaatgtattacgggtttgatattggtggaacaaaaattgcgcttggcgtgtttgatagcggtcggcagttgcagtgggaaaagcgggtgccgacaccgcgtgacagctatgacgcatttttagatgcagtgtgtgagctggtagctgaagctgaccaacgttttggctgtaaaggttctgtcggcatcggtattccgggaatgccggaaacagaagatggtacgctgtatgccgccaatgtccccgctgccagcggtaaaccgctgcgtgccgacctgagcgcacgtcttgatcgcgatgtacgccttgataacgatgccaactgttttgcccttagtgaagcctgggatgatgaatttactcaatatccactggtgatggggttgattctcggcaccggtgttggcggcgggctgattttcaacggcaaaccgattaccggtaaaagctacattaccggcgagtttggccatatgcgtctgccggttgatgcgttaaccatgatggggttggatttcccgttacgccgctgcggctgtggtcagcatggctgcattgaaaattatctgtctggtcgcggttttgcgtggctgtatcaacactattatcatcaaccgttgcaggctcccgaaattattgcgctttatgatcaaggcgatgagcaggcaagggcgcacgttgagcgttatctggatttattagcggtttgtctgggaaatatcctgaccatcgttgaccctgacctggtcgtcattggtggtggcttaagcaatttcccggcaatcacaacgcaactggcggacaggctgcctcgtcatctcttacctgtagctcgtgttccgcgcattgaacgcgcgcgccacggtgatgcgggaggaatgcgtggtgcggccttcctacatctaaccgattaaacaacagaggttgctatgctgagccgtcggggtcatcggttaagtcgttttcgtaaaaataaacgccgcctgcgcgagcgtttgcgtcagcgtatttttttcagagataaagtggtgccggaagcaatggaaaaaccaagagtactcgtactgacaggggcaggaatttctgcggaaagtggtattcgtacctttcgcgccgcagatggcctgtgggaagaacatcgggttgaagatgtggcaacgccggaaggtttcgatcgcgatcctgaactggtgcaagcgttttataacgcccgtcgtcgacagctgcagcagccagaaattcagcctaacgccgcgcatcttgcgctggctaaactgcaagacgccctcggcgatcgctttttgctggtgacgcagaatatcgacaacctgcatgaacgcgcaggtaataccaatgtgattcatatgcatggggaactgctgaaagtgcgttgtagtcaaagtggtcaggttctcgactggacaggagacgttaccccagaagataaatgccattgttgccagtttccggcacccttgcgcccgcacgtagtgtggtttggcgaaatgccactcggcatggatgaaatttatatggcgttgagcatggccgatattttcattgccattggcacatccgggcatgtttatccggcggctgggtttgttcacgaagcgaaactgcatggcgcgcacaccgtggaactgaatcttgaaccgagtcaggttggtaatgaatttgccgagaaatattacggcccggcaagccaggtggcgcctgagtttgttgaaaagttgctgaagggattaaaagcgggaagcattgcctgatgcactacgcttatcaggcctgcaaggggacgcaattaattgaatttgcgggttttgtgggccggataaggcgttcgcgccccatccggaataatacacgcgcacttttccggcctcttttatcgtttactcgtcaataacaatgcggcaataaacgtacagacaccaattagccctgcccagagtgggcttattctggtaatcgcaaagctattatcgatatacaaacataaagcctgataacccatattggcaatagtcatcgccactgcaaattttaacgcataaataaaacgagtcgtgtagtaaaagatcctggaaaataagataaacgtcgcagcccaggcgataaaacctaatgtgttggtgctgccggggggagcattttcatgctgttgtcctggatgcggataatacgttagtggcggcgtgctttgttttaatatctgtgcttgtagaacagccaatgcattattgattccctgataccagagatctgcatttaaataagccagcgtgtgattttctatcagaaggccgagatgtttatcgtccagaccactttcaacctggccgttggtgatcataattaaccgtggttcgcgggtagtaaatagtaacagaacacttccttttacatcactcaaactagaactcgcatgcgccagcatcgctttaccattttgtctgagactggcttcattattaatgtcgggtaaaaccacaataaacggtgcaattcccgtttgttggcgaaaaagctcggctttatgcgcgatctcttcagcatctggtacagtaccggtaacgtccgtaaaaagtgtcttcattattggaattaatggcttgctggctgctgtcagaggcaggagtatcagtaaactgagcagtataatgaattttttcatgggcgggacttccgtttcctgcgactttttttagaggagggcatacttattaataaaccgacggcgataaaaataacgcccataatgccgataaacccccatttaaaaaaattaacccacgggttatttatctcagccttttcaggatgcccgggagaataataaacattaactttatcgccttcgctgtcttcataaaaatcgctgccgatactgctattgaaaattagcgtgtaatctggcgtcggtcgaaaggcaacgacgggataccagctaccatctttacccgtgcgatgagaatgactggagtgccagacggtatcaacaatgacgccttcggtatgaatcgcgtctttgctataggtgaactggttataaaagacaacaacagaaatgaggatcagtaccagaccgataccgaggaatatacgaaagaaaactttactgtcctgactcattagccacatccttgctaactaaaaaacgggcggtaataccaccgcccgcttgctgaattaacgtcctgctttcagcttctgataatactcttcataaatgctgctggctgcgccaacgtcattctgccattcgccatttttaatggtttcagcatccgggtagagtgttttatcgttcgccacttctggacttaacagcttacgcgccgcaaggtttggcgttggataaccgatagtttcagcaacctgttttgccacatccgggcgcagcaggaagttgatcaatttcagcgcgccttctttgtttttggcatttgccgggatcgccaggctgtccatccagaaaatgccgccttctttcggccacaccacgtcaattggcgtacccgcctggcgtgcaacgaaagcagaaccgttccagatcatgccgaggttaacttcgccttccatgtacgggttcgccgggttatcggagttaaaggctgccacgtttggcatcagttttttcagctcgttatatgcagcttcaatctctttcggatcggtggtgttaccggagtagcccagcttacgcagcgccatctggaacacttcacgggcatcgtcggtcaacagcaggctgcctttgtactctggcttccacagatcggcccagctggtgacagatttcggatccaccgcatcaccgttaacaccaatcgccgtcgcaccccagatatacggaatggagtagtcgttattcgggtcaaaaggcttgttgagcatgtctggatcgagattgctgaagtttgttaacttgctcttgtcgatcttctggatcatcccttctttacgcattttatcaacgtaataggtactaggaaccaccagatcataggcaccgtctttgtatgttttcagcttggcgtacatggtttcgttgctctcgtaagtgctatagataaccttaataccggtttctttggtgaactgttcaagcagtcctggcggcacgtactcggtccagttgtagaaatacagcgtgttgttgtcatcggcgtgagcggcgctcatgcccagtgccagagcacccgccgcgagcaggtggcgactccattttttcatttaacgtcccctgtgttacctttcgttttatcacgagcaataagctggctggcaataaccatcaccaggctcagcaccagtaatatggttgccagcgcgttaacttccgggcttacgccgactttgaccatgctataaatttttaacggcagaatttcataacttggtccggtgacgaagctagaaactaccacatcgtccatgctcagggtaaagcttaacacccagcccgccgccaccgctggcattgccagtggcagaatgatttttcgcagaatggtaaattcgctggcaccgagatctttcgccgcttccagcattcgcacgtcaaaacctttcaggcggctatacaccgtcaccaccacaaatggcaggcagaaggtgatatggctgaacagcaggctccagaagccaagctgaatacccagcagcataaacagcaccagcaggctaatcgccatcacgatatctggactcatcatcaccacaaacagcattccgctaacgaacggcttaccacgaaagcgataacggtacagcgcaactgccgtcagactaccgataagcgtagcaaacgtcgcgctaaacaccgccattgttagactatgctgcgctgcctgtaacaggctgtcgttgttcatcagcaggctataccatttggtggtaaagccctgccagttgatgccaaagcggctgctgttaaaggagttcacaatcaaaataatgattgggatatacaggtacgcgtagatagcggtcataaaaccgccgcgaagcagtcgaccgatcattcgagttccaccttcttattcagcaaacgagaagcgcgccagtaaaccagcaacatcaggcccattacgatagtcagcgtaatgctggtagctgcaccaaacggccagtcacgaatattaaggaactggaccttgatgacgttaccgatcagcaggtttttcgcaccgcccatcaggtcggatacatagaacaggcccatcgctggcagcatcaccagcagacatccggcaataattcccggcatcgtcagtggaataatgatacggataaaagtctgtaacttgctggcaccgagatcgcgcgccgcctcaagcaacggcttatccagtttttcgatactggagtacagcggcatcaccataaacggcagcagaatgtaaaccagaccgataatcaccgcactgggcgtgaacatgatacggattggtgtgtcgataacgcccagccagagcaaaaactcgttgagatagcctttggtgctgaggaaaattttcagcccgtagatacgaattaaactgttggtccagaacggaacaatcagcagaaacagcagcagcggacgcaccttgtgtggcaacttcgccagaaaccaggcaaacgggtagcccagcaccaggcaggcgagggtggcgatcagcgccatattcaggctgtgcaatagcacttcaaaatagagcggatcgagcagacgcgtgtagttatccagcgtaaagaccattttgacaaaactggcgtcgtcgcgggtcaaaaagctggtgccaatgatcatcaggttgggcagaaagacaaacaacacaagccaaccgacaatagtgacaatcactacattctggaacttacttgtgttcttcatcagccagtacgacctcccagctttctacccaattaatggccattttttggtcgagagagtggtcaaagtcaggatcgtcttcattgaagaattcgctgaccatcaccatcttgccattttccagttcaacaacgctctccagcgtcatgcctttgtagttacgctcgcgaacgtaaccaatcagcccttcagcgtggttgtcgtcgttaatctcttcaacacgtaagtcttccgggcgcagcagaacatgcagtttttgccccggttcaacggcgaagttaacgtagatattacattcgcggccttcaacgttggcgcgtacgcgctgctcgtctagacgttcgatgacagtggcgttaaacatattgatttcgccaatgaagccggcaacaaacaggtttttcggctcttcgtagatttcacgcggcgtgccgtcttgctcaatgcgaccatcgcgcatcaccacaatcctgtcactcatggtgagtgcttcttcctggtcgtgagtcacaaagacgaatgtaatgccaagcttacgctgtaacgctttcagctcgttctgcatttgcttacgcagtttgtaatccagcgcactgaggctctcatccagcaacaacagacgaggcttgttaaccaccgcgcgagcaatggcgacgcgttgctgttgaccaccagagagctgatgcggtttgcgttgagcgaaggtttccaactgcaccatccgcagggcttccatcacgcggggcgtaatttcagcagcgggggttttttgcatgcgcaacccaaaggccacattttcgaacacggtcatgtgggggaaaagtgcgtagctttggaaaacagtgttcacatagcggttttccgccggaacgtgggtgatgtcctcgttatccagcatgatgcgtccggaatcaacagtttccagacctgcaatcaggcgaagaacggttgttttaccgcagccagaagggccaagcagcgtgaggaactcgccattgttgatagtcagatccagctggggaatgacctctttaccatcaaagcatttgcgaattcccgccaattgcaccagcggactaaggctactcggttgtttattcaattttttactctgtcccatgtaaacgcaacggatggcttaccgatgcggggtttgtggttaaccaccttggtgactcttaatgagggcggtaattctacggcaaaccgcttgaatcgccaatctttgttgtgaattactggcttagctttatattcattaaggtaatgctgataaatattcccgcttgcaggggtaaaagtgacctgacgcaatatttgtcttttcttgcttcttaataatgttgtcacaaaaagtgagggtgactacatggataaactacttgagcgatttttgaactacgtgtctctggatacccaaagtaaagcaggggtgagacaggttcccagcacggaaggccaatggaagttattgcatctgctgaaagagcagctcgaagagatggggcttatcaatgtgaccttaagtgagaagggcactttgatggcgacgttaccggctaacgtccctggcgatatcccggcgattggctttatttctcatgtggataccagtccggattgcagcggcaaaaatgtgaatccgcaaattgttgaaaactatcgcggtggcgatattgcgctgggtatcggcgatgaagttttaagtccggttatgttcccggtgctgcatcagctactgggtcagacgctgattaccaccgatggtaaaaccttgttaggtgccgatgacaaagcaggtattgcagaaatcatgaccgcgctggcggtattgcaacagaaaaaaattccgcatggtgatattcgcgtcgcctttaccccggatgaagaagtgggcaaaggggcgaaacattttgatgttgacgccttcgatgcccgctgggcttacactgttgatggtggtggcgtaggcgaactggagtttgaaaacttcaacgccgcgagcgtcaatatcaaaattgtcggtaacaatgttcatccgggcacggcgaaaggagtgatggtaaatgcgctgagcctggcggcacgtattcatgcggaagttccggcggatgaaagcccggaaatgacagaaggctatgaaggtttctatcatctggcgagcatgaaaggcaccgttgaacgggccgatatgcactacatcatccgtgatttcgaccgtaaacagtttgaagcgcgtaaacgtaaaatgatggagatcgccaaaaaagtgggcaaagggttacatcctgattgctacattgaactggtgattgaagacagttactacaatatgcgcgagaaagtggttgagcatccgcatattctcgatatcgcccagcaggcgatgcgcgattgcgatattgaaccggaactgaaaccgatccgcggtggtaccgacggcgcgcagttgagctttatgggattaccgtgcccgaacctgttcactggcggttacaactatcatggtaagcatgagtttgtgactctggaaggtatggaaaaagcggtgcaggtgatcgtccgtattgccgagttaacggcgcaacggaagtaagcgaaaagggatgcggcatgtgatgccgcatccggcttaaatccaaacttacccttcgaagaaccaatacccgctattgaccagcgccgcgagcatcgcgaggaaactcggatcttccagcgcatcgccaaaattctccgcagtcagcgcaatgttgctggcgagtgcatccagtgccggacggtgcggggaatcgatcttctcaccattggcatacacgtcgtcgccaatgcgcaatacgcgcagaccacccaggcgcaccagcacttcaccttgtttcagcgcatcgtagatttcatccggctgataaggcggctctggcggcgcgatatccagttcatgacgactctgggatataaactcgccaaaccattgcttaaagtgttccggctggttgatcaattcgagcatcatctcacgcagtttatccatctcttgcggcagaacatccgcaggatgagcgcgaggtggaacatccggatcgctgtagtagttgccgcccagttcacgttgcagcacataatcggcaaatccactaatcagttcccgcgtatttggcgcgcgaaagcccacggaatagttcatcgcattttccagcgcgtagccttcatgcgggaatcctggcggaatataaagaatatcaccaggctccagctcttcatcgatgatggcttcgaacggatcgacctgtaacagatccggatgtgggcagtgctgtttcatttgcagcttttcgcccactcgccagcgacgacgtccggtaccctgaatgataaacacgtcgtactgatcgagatgcgggccgacgccgccgccgggtacagaaaaagaaatcatcagatcatcaatacgccagtccggtagttcacggaacggtcgcatcagcgcggcggtcggctcatgccagtggttcactgcctgtaccagtaaactccagttggtttcaccgagatgatcgtagctttcgaacgggccgtggctgacctgccatttgccatcctggtgactgaccagtcgactgtcaacttcgctttccatcgccagacccgccaactcgtctggagagatcgggtcaataaaattattaaagccgcgttttaacaccaccgggcgtttctgccagtgacgttcaagaaaatcgggccagttaagagtgagttggtattccatgttaagcatccacaggctggtatctgcaaccgattataacggatgcttaacgtaatgcgtgaagtatgggcatatttattcatctttcggcgcagaatgctggcgaccaaaaatcacctccatccgcgcaccgcccagcatgctctctccggcgacgattttaccctcatattgctcggtgatttcgcgggctaccgccagccctacaccttgcccagggcgtaaagtatcaacccgttgaccacggtcgaaaatgacctctcgcttgcttaatggaataccggggccatcatcctcgaccacaatatagagatgctcgtcggtttgccttgcagaaatttcgacaaactcgaggcaatatttacaggcattatccagcacgttgcccatcacctcgacaaaatcgttctgctcaccgacaaagctgatctctgggctaatatcgagagagatattgacccctttgcgttgatacactttgttcagcgcactggtgagattgtccagcagtggggcgaccggatgcagctcgcggctgagcaatgtcccgccgcgcatactggcacgatgcaggtagtagccaatttgctgactaatgcggctgatttgctccagcattaccggctcagcatcactgacgctcatcttttcactacgcagagaacgcagcgtactttgcagcaccgccagtggcgttttcagactatgggtcaggtcggtgagcgtcgtacggtatttgtcgtaacgttcgcgttcactttttaacaatcggttcaggtttcgtaccagactggtcagttctcgcgttgtggctggattgagcaattcgcggttatgttcttccagttcgcggacttcttttgccagggcttcgatggggcgtaaactccaccaggcggcgacccacagcagcgggatcactaacagcagattggcactgagcacatagataaaccagctccagaccatataggaactttttagctccaccggaatggtatccaccaccacaatggttaattttggcatccggcttgttgccgggtagacgtttactgccacgctgtgggtcatctccgcgtcgtcatcatcttcccgcacttcctgcaactgttgctgtatgctatgatctccactcagcaagaggctggtatcgttaacatccgcttcaatttcatgaaaaccattgcttttcagccagtcaggctggatcatcttcatcagccagggcacgtcacgttgcgcccataaaagctgcccgttctcatcataaattagcgtcatggtggggctttgcttgtcgatattttcgggtaactcgacatgcaacttattgttttcccacttcgcaagggtatagaacagattgctctcgccacgtaacagccgaaacgtagttttatcgaaactgacgctataaccgatcagcgcgaccattccgtaggcaaggctaagcaccagtactaccgctgccgttgccaacagaaaacgtacccgcaggctgagcgggaaaaaaagacgcagtaattttttcatcagcgcaattcgaacagatagccctggccgcgaacggtggtaatcacttcttggggatattgtgcctgaatttttttgcgcagacgtcccatcagtacatcaatggtatggctttcccgcagctccgcatccggatagagttggagcattaagctatctttgctgaccactttgccattattgcgtatcaacgtttccataatagtgtattcgaacgcggtcagtttgatcacttcgtcattaatagataattcacggcgagagagatcaacctgaaacggggggaggctaatgacctgactagccagaccgctattacgccgcattaatgcctgcattcgcgccatcacctcttcaatatgaaacggtttagtcacataatcatcagcaccggcacttaatacttcgactttgtcctgccagctttcacgggcggttaataccagaatcggcagactaacatcgttgctacgccagcggcgaatcagactcagaccgtcctcgtctggcaatccgagatcgacaatcgcaatatccggtatatgttcattgagataataatcggcttctttggcatcttctgcgtcatcgacctgatgaccagcatcctgaatctgaactttaaggtggtgacgtaacaacgcattgtcttcaacaaccagtacgcgcatttttatttctccctgtcttaattattaaaatagtgtaacgcgattatgtggttatgggggtaaacattaaataaaccagcggggaggggaggtaaagtgaaaaaataaaaagcggataatcttaataagcaggccggacagcatcgccatccggcactgatacgaggtttatttcagctcatcaaccatcgtgatagctcgaccaatatagttagccggcgtcatcgctttcaggcgggctttctcttcttctggcaacgccagaccatcgataaactgcttcatgccttcggcgtcaacgcgcttaccgcgagtcagctctttcagcttctcgtacggtttttcgatgccatagcgacgcataactgtctggattggttcagccagcacttcccagttgtgatccagttcatccagcagatggtcacggttcacttccagtttgctcacgcctttcagggtggattgatatgcaatcaaggcataaccgatacccacgccgaggttacgcagcacggtagagtcggtcaggtcacgctgccagcgggaaaccggcagtttgcttgccagatgctgcaataccgcgttggaaaggcccagattcccttcggagttttcgaagtcgatcgggttaactttatgcggcatggtggaagaaccaatctcaccagcaatggttttctgtttgaagtggttaagggcgatataaccccagacgtcacggtcaaagtcgatcagaatagtgttgaagcgcgcaacgcaatcaaacagttcggcaatgtagtcgtgcggttcgatctgggtggtgtacgggttccactgaatacccaggctggtgacgaactcttcgctgaactgatgccagtcaacttccgggtaagcggcgatgtgggcgttatagttaccgaccgcgccgttgattttgccgaggatctccacctggttaagctggcggtactggcgctccatacggtaggcgacgtttgccatctctttaccgatggtactcggcgtggctggctgaccgtgggtacgagacagcagcgggatatcgcgatactgaacggcgagatctttaatgccatcaatcagttgacgccagtatggcaggatcacttcatcacgcgcggttttcagcattaatgcgtgggagaggttattgatatcttcgctagtacaggcaaagtggatgaattcagaaaccgcgtgcagttccgggatctccgccactttttctttcaggaaatactcaaccgctttaacgtcgtggttagtggtacgctcgatagttttgatgcgcgccgcatcttcttcgctgaaactggcgacgattgcatcaaggtaaccgattgcgtcggcagcaaaagcaggaacttccttgatcgctgcgtgcgcggccagtttttgcagccaacgtacttcaacttgtacacggaatttcagcaaaccatattcgctgaaaatcccgcgcagcgcgctgactttatcgccgtagcgtccatcgacaggggaaacggcggtcagactggataattccatagatcacaactccggggttaaatgagcaagaatttgttttgcctgagtggtcaggcgattacgagaaaacatcagttgcagacgtccgccgccgacctggtgccagagcacggcggcgcgaatgcctgccagcagggttgcgcgaactttcgcctgcacttgtgggctttgcagtacagcaggggaaccggtgacctgaatgcgcgggccaagcgggctaatcacatcaacatagatagcagccatcgcgctcatcagcgtttcggactgtaaatcgaagtgttcgagctggcgttgcaggccgttgatccggttgcccagagtgtcgagcgcgcctttcgcactggagagtttgcgctcaagcaccatcaagctgagtgtgtagcgggttaattcggcgtttaagccctggcgactgctggcattgagcacgccgagcagggtttccagcccgacgcgcaggttggcttcgctaccgccaaaaaccgccagcgtgctgctggggttcatatcaataatactgttgagactgacgtgtagcgcatcggcatcacaatgcccctggtgagcgagttgttgcaccaggcgtgcgctctgacaaataccggccagggcgagggtgatgtcatagtaattctttgccacgttcactgcttccttgttttaagtaaagataataatcagaccggcagcggcagacgctgctcaataataccgccaccgaggcacacttcaccgttatagaagacggcagactggcccggcgtcacggcggcaaccggttcatcgaaaatcacttcaatgcgatcatcgtccagcgccttgacggtgcaagggatatcggtctggcgatagcgggtttttaccgtgcaacgcatagtgccggtgaatggttcgcgatcgacccagtgcaactgctgggcaatcaacccgacagacatcagccgcgggtgttcatggccctgagcgacaaccagaatgttgttttcgacgtctttgtccaccacataccacggttcttcggtaccttctttggtgccaccgatacccagacctttacgctgaccgagagtgtgatacatcagcccctggtgctcaccaatttcatcgccatcgacggtaatgattttgcccggttgcgccgggagataacggcccaggaactcgcggaatttacgttcgccaatgaagcaaatgccggtagagtcttttttcttcgcggtgaccagaccaagatcttcagcaatcttacgcacctgcggtttttccagttcgccgaccgggaacaggctttgcgcaatctgctcatggctgagcgtataaaggaagtagctctggtctttattgctgtccagaccacgcagcaggcggctcttgccatcgacatcggcccgacgtacgtaatgaccggtagcgatataatcggcacctaaatcttcggcggcaaattcgaggaaggctttaaatttgatctctttgttgcacagaatatccggattcggcgtgcgaccggctttatattcggcaaggaacagttcgaagacgttgtcccagtactcggcagcaaagttaacggtgtgcagttcaatgccgagcttgtcgcagacagcctgggcatcagccagatccgctgccgctgtgcaatattcctcaccgtcgtcttcttcccagttcttcataaacaggccttcgacctgatatccctgttgttgcaacagccaggcagaaacggaggaatcgacaccgccggacatgccgacgattactttttttgcggtttcagacattggatcactcacgacattgaacttcaaggcggcgtattctatcacgcagccttttagatgacaccctttgtaaaaggccagttaaaatcgccaatcatctccagcggataacgttgcccgctttgataacaacgaatactttccgccaccagcgggctacgaagattactcgcctgtaaaatttcttcggcgctgacccaacggcagcagtcgatatcgctgtcatgaggctgggtcgggcatatttgctcaagctcaatggcaaagaggaaacgcaaaaacggcgttttatctggcgcaatccactgatgcatacgaataaagtgttgcggctgcgcgctgatgccggtttcttcccacagttcacgggcggcggcttccactaaggtttcatcggcttccagatgcccggcaggttggttccataacgctttaccattaatcgtctcttcaacgactaaaaatttgccttctgcgtgcaccacgcaagcaacggtaacgtgcggtttaaacattttgcatccttaatctgtcacttctcgccattcaccattggcaagattatccaaagagtaatcacccatcgcatagcgaatcagtcgcagcgtggggaagccaacatgggcggtcatgcggcgcacctggcgattacgtccttcatataaggtgatcttcagccagctggtgggaatacttttgcgttcacgaattggtggattccgcggccataaccacgcgggttcgtcaaccagctccgcgccggcgggcagggtagggccatcatttaaggttacgccattgcgcaaggcttcaagtgcgtcttgtgtgggaataccttccacctgcacataatagatttttccggtgcgtttacccggctgggttaaacgcgcctgcaacgcgccgttattggtcagcaccagcaacccttcgctatcgcggtcaaggcgacctgctgcataaacaccctgaaccgggatgaattcttttaatgttttgcgtccggcttcatcggtgaactgcggaagaacatcgtagggtttattgaacaggatcacacgcgtgggctggttttcaggtttacgcctggtagaacgttggctgctgaatcgcttaacctggtgatttctaaaagaagttttttgcatggtattttcagagattatgaattgccgcattatagcctaataacgcgcatctttcatgacggcaaacaatagggtagtattgacaagccaattacaaatcattaacaaaaaattgctctaaagcatccgtatcgcaggacgcaaacgcatatgcaacgtggtggcagacgagcaaaccagtagcgctcgaaggagaggtgaatggaaagtaaagtagttgttccggcacaaggcaagaagatcaccctgcaaaacggcaaactcaacgttcctgaaaatccgattatcccttacattgaaggtgatggaatcggtgtagatgtaaccccagccatgctgaaagtggtcgacgctgcagtcgagaaagcctataaaggcgagcgtaaaatctcctggatggaaatttacaccggtgaaaaatccacacaggtttatggtcaggacgtctggctgcctgctgaaactcttgatctgattcgtgaatatcgcgttgccattaaaggtccgctgaccactccggttggtggcggtattcgctctctgaacgttgccctgcgccaggaactggatctctacatctgcctgcgtccggtacgttactatcagggcactccaagcccggttaaacaccctgaactgaccgatatggttatcttccgtgaaaacagcgaagacatttatgcgggtatcgaatggaaagcagactctgccgacgccgagaaagtgattaaattcctgcgtgaagagatgggggtgaagaaaattcgcttcccggaacattgtggtatcggtattaagccgtgtagcgaagaaggcaccaaacgtctggttcgtgcagcgatcgaatacgcaattgctaacgatcgtgactctgtgactctggtgcacaaaggcaacatcatgaagttcaccgaaggagcgtttaaagactggggctaccagctggcgcgtgaagagtttggcggtgaactgatcgacggtggcccgtggctgaaagttaaaaacccgaacactggcaaagagatcgtcattaaagacgtgattgctgatgcattcctgcaacagatcctgctgcgtccggctgaatatgatgttatcgcctgtatgaacctgaacggtgactacatttctgacgccctggcagcgcaggttggcggtatcggtatcgcccctggtgcaaacatcggtgacgaatgcgccctgtttgaagccacccacggtactgcgccgaaatatgccggtcaggacaaagtaaatcctggctctattattctctccgctgagatgatgctgcgccacatgggttggaccgaagcggctgacttaattgttaaaggtatggaaggcgcaatcaacgcgaaaaccgtaacctatgacttcgagcgtctgatggatggcgctaaactgctgaaatgtagtgagtttggtgacgcgatcatcgaaaacatgtaatgccgtagtttgttaaatttattaacgggagcgtaacgctcccgttgttttttgttaggctgctaacggttatcaaaattttatcaaaaaaagttatcaaaacccctcggtagttttggggtaggctggccggtcaggtggtagttctactactagtctcccacatagatattccttagctttttattattgctggcggacgctcgttaatatttaaggtcttcattgattaagacatccccaaagttagttatgtattcactgttattaggacaattatgaattaccactccttacacccgctcaaatattgttaaattgccggttttgtatcaactactcacccgggactcgccaggggacagccaacaggcattgggtgcaatcaccttagcgttcaggtacatgcggaatgtaaaaaaggccgcgagcgcggccccttcacatacatctttagtactgagactgtttaacctagggaattattatcgtattatattgcattacaactcccaacagtgacatatgaacttcctgctttactccacgactttaatatttcaaggccatgtgaagaacatatttcttgcactgcgagttcatcgagtaatccatagtaagaaacactttttgaatttttgtaaatgtatccgtaaagatgttttcttcctgtttcgtattttttgaagtatgagcttttatattgatttacaataagagtctcacctcctgattttagtaatctcttgatgctaagaactatcagataattcaaagcgtggctgtgatgataggaattatgttttttacgtgaatgagaataatcttaaatgaggaataactcattgattgacaatatttttattcaagaagtgtcattgactgttaacgcaatgttgtaaaggtaagataatctgatttatcaatattattgtgtgatttttatgtgagcagaagatattcatcagcaacgattacattagtcattttattttgccgacggcctcattgtcgaaagataagcgtacgacagtattatcagaaaagagtgattttttatccaactacacttcagcgcactgcgtgtaaaaaatgcctctttcttatgcgggatatcatcatttcatcatgatgtctttggtgagcggtgaacacaatgcacctgcgctgtctcttcaggatgaatcccctggtctggtgcctgcgggctgatgttgcagcagagcttaggagtcttagacgctactatcatttatccaatggcatggaaagcaaaagtgtcgatacccgcagtatatatcgtgaactgggtgcaacgctgagttacaacatgcgcctggggaacggtatggaaatgaaccctggctgaaggcggctgtgcgcaaagaatttgtcgatgataaccgggtgaaggtgaataatgacggtaatttcgtcaatgatttgagcggcagacgtggaatataccaggcagctattaaagccagtttcagcagtacgtttagcggacatctcggggtggggtatagccatggtgccggtgtggaatccccgtggaacgcggtggctggtgtgaactggagcttctgaccatcaacgattaaactgcgcttcggcgcagttttcgtttacaggatgttgaaagggaaaattctggggcaaaaaaagcccgccagttacggcgggaaacctcatcctatgggagaacaatgaataatgaaattgcggggttatcatctcccagtatatccatactaacaataaggttatttactcaaccaggcataaacattttgttttgtgcgtgggaacagccttaaggtgtaaagggggaggtggaaatagcaatgaggagtatcagcaagaatactcgccgctttaccacaacgtggatgagagggatgaaaaactcaaggcagagataactctgccttgaagataaatgcgcttttacagcgggcttatttcagctcttctgcttccggtaaggtcacgttcagctcaagaatagaaatatcgccatctttttgctcaagctgtacggttaccatctcaggatcaatttgtacgtatttacaaatgacctcaagaatatctttacgcaactgcggcagataatgcggttctgcatcgctgcgacggcgttcagcaacaataatctgcagccgttcttttgcaatgttggctgtgtttttcttccggctgagaaagaaatcgagtaatgccataacttatcctccgaacaagcgtttgaggaagcctttcttctcttcttcaatgaagcggaaaggacgttcttctcccaacagacgttctacggtatctgcgtaggctttacccgcatcggcgttaatgtcgagaatgaccggttcaccctggttagaggcgcgcaatacactttgatcctctgggatcacgccgacgagtttgatgcgcaggatctccagcacatcttccatgctcagcatgtcacctctgcttacgcggcctgggttatagcgcgttaacagcaggtgctctttaataggctcttcgccattttctgcgcggcgacttttgctcgccagaatgcctaaaatacggtcagagtcgcgtacactggagacttccgggttggtggtaataatggcttcgtctgcaaaatagagtgccattaacgcaccggtttcaatccctgccggggagtcacaaacgataaattcaaaatccatcgctttcagatcatcaagaactttggcgaccccttcacgggtgagggcatctttatcgcgtgtttggcttgccggcagaatatagagattttcagtacgcttatctttaattaacgcctgatttagcgttgcatcgccctgaatgacgttgacgaaatcgtaaacgacccggcgttcacaacccataatcaggtcgagattacgcaggccgatatcaaaatctatcacgacagttttctttcccttctgggccaaaccagtggcgatggccgcgctggaggttgtcttaccaacaccccctttgccgctagtaacaacaataatgcgtgccatagaaattccttgttaaaaagggatcaatttaacggttgaacggtcaaagcgttttcgactaactgcagtcgcgccgctttgccataaaattctgctgggatttgatcactcagccagtattcacctgcgatggacaccagttccgccatcaggttcgtacaaaatatttgcgtttcccggtcaccacttgcccctgccagcgcacgaccgcgcatcatgccatagacatgaatgttcccatcggcaatcaattcggccccagcgctaacgtggcttgtaacaatcagatcacattgtggagcataaatacgctgaccggaacgcaccggggtatctattaaacgcgtttttgtgaccggcgttgtattttgcgctggagcctgcggtgtgggagctggacgtggcgctttttcctttccttccgtcaggataggcagccccatcttttcaatttcggctttaagttgcgcatctttgcagccacttacgccaataacccgcaaaccggttgcgctaaccgccttatgcatcgcactccagtttaccgggtcttccagtgcactgacgttgagtacaacgggggcatgttttaaaaatgcgggggcctgagcgattttgtcttccagcgcctgatggataaccttaggttctgcctcatgcagatgaaccacagataaagtgaagctactgcctttaagctcgattggcgtgttactcatcctggccttactcaattagctattaatcatcgccagcgcgcgatgatgttccgaagactataaggcatgttatagtctggattatattgaggcaagtcaccctcccatttattcagagtaaaagtctattctgtgataaatggcgctgattcatagcttaaaaaatacccttgtcaatcaacccattgccgtcgtacttttgattgttcttatttacgcttcctttttccgcaccctaatcgtgacagcatctccagacctgtttaaatatccagtattgaggcaagtgtattttttcaccacgccaggctttcttaactttccattttttgcggcatcattaaagaacagatacccgttatcttaatatccgccacagaattgctctatcatagaaaccgcagaagacgtctgatacttctgtcaggtcatcgtaactcgtccaggtcagcggttttgattacggattgatgatgaaatgagcataagtgttgtacggttggattatcaggatgtgctatgaatatgatgcgtattttttatatcggattgagtggtgtggggatgatgttcagtagtatggcgtctggaaatgacgctggcggacttcaatctccggcgtgcggcgttgtttgcgacccgtatatttgtgtgaacagtgatggcatttccccagagttaacaaggaaatatctcggcgaaaaagccgctgaaaacttacaaagtttacaaggctacgatcccagcgaatttacattcgctaacggtgtattttgcgatgttaaagaaaaattatgtcgtgatgatcgttattttggtgtggatggtaagcggagtggaaaaatcaatcaaaccaccacaaagatgttatttatgtgtcgtgagtgatgtcttgtttacattatgttctattcgtcattaacctcttgagcgacagagaggagtggggcattaacgtttatgacggggagagtccccgtcggttgacatttacttaatttgaatatcgacgttatattttttagttttgtttttacgggcgtcgtttcgggtttgcaacactcgcagctcatatttgccagaagcagggagactgtattgtccgtgactatcgagttctggggaatatctggataaatcaacactatcatcgattcctggcccgaagaggtaagtatcagcgccttcattagagatactcacatgcactttctgaccttttttggcatagaaggtatatgtatcgtaatcgtatccctttatttcgccggagtactgagcgctgctatggccttttctgaactcaacattgacattcttacccgcagcaaagctcgtggaggttagcagtgcaagcagcaatacagccttcctgatgctcttgattttcattggtagtctcctgttcagaatgagtacgatgaactgttataatataacaatccctaacgggagaattccagtggctttcctgcgttcggtaaaatcacgttgcggcatttttgccggggggattacttataaagggggcatggactcaacaaaccgtagaaatctacagctggctggcttgtggcgcgggtttcattgatgttagcttatgccaaaacctggcatcttaaagagtaaaagtatgttttgtgtgatttatcgaagcagcaagcgtgaccagacctatttatatgtcgaaaaaaaagacgattttagccgtgttcctgaggaactgatgaaaggttttggtcagcctcagttagcgatgattctgccgctggatgggcggaagaaactggtcaatgccgatattgaaaaggttaaacaggcattaaccgagcaaggttactatttgcagttaccgccaccacccgaagatttgctgaagcaacatctttccgtcatggggcagaaaacagacgacactaacaaataaccgatatccggcggtggcattatctttgtcggcgcgggttttcatatccacgataaggtgaggggaacgttatgtatcaacatcacaactggcaaggtgcgctgctggattatccggtgagtaaagtagtctgtgttggcagtaactatgccaaacatattaaagagatgggcagcgcagtgcccgaagagccagtgctgtttattaaaccagaaacggcactgtgcgatctgcggcagccattggcgatcccatccgatttcggtagtgttcatcatgaagtcgaactggcggtgttgattggcgcgacactgcgtcaggctacggaagagcatgtccgcaaagccattgccggttatggcgtggcgctcgatctgacattgcgtgatgttcagggaaaaatgaagaaagccgggcagccgtgggaaaaggctaaagcgtttgataactcttgtccgctttccgggtttattcccgcggcggaatttaccggcgacccgcaaaatacaacgctgagcctgagcgtaaacggcgaacaacgccagcaaggtacgactgcggacatgatccataaaatcgttccgctgatcgcttatatgagcaagttttttaccctcaaggccggtgacgttgtgttgacaggcacgcctgatggcgtcggcccgttgcaaagcggtgatgagctgacagtcactttcgatgggcattctttgacaactcgcgttttgtaatactttttgccgcctgaaagcggcggcaaaacttgcatcgctgtgccagactggttataaggtgcgttttaacgtaatggcggaacacctgatgagcgatgtacctttctggcaaagtaaaaccctggacgaaatgagcgatgcggaatgggagagcttgtgtgatggttgcggtcagtgttgcctgcataaactgatggatgaagacaccgacgaaatctacttcactaacgtcgcctgtcgccagctcaatattaaaacctgtcaatgtcggaactacgaacgtcgtttcgagtttgaacccgactgcattaaattaacccgtgaaaatctgccaacattcgaatggctgccaatgacctgcgcttatcgtttgctggcggaaggtaaagatttacctgcgtggcatccgctacttactggtagcaaagcggcaatgcatggtgaacgtatctctgtgcgtcatatcgcagtgaaagaaagtgaagtgattgactggcaggatcatatcttaaataaacctgactgggcgcagtgataaatttaatagatgctgatgggggctttcttaatatacgtctggatgctcgccatttcgtagccctgtttttgaaagcgctctgtcataatgagagttacccgataccttattatcaacaggtaactctcaatctttaaaaaacgtctgtgtttttaaatgtgataaaccttataccttgagtacatggagagaataatcgcttatcagacttcaggtacctcaaagagtgtctttttaccgtgtcttttctgatactcattacaggtgttaatcatttttttggccgcttcttttagcaaagaaagcattaaatcatcataatcaacgtagaatctggttgtttcagtttccgtttttatctcaccgatggcggctatttcggtggttaatttcaatttggcggcatcgatatctttattcgcttgtttaaccgtgttagacagggtggtaaagaaattctgcacagattttaacttgttcttcaattctggaatcagttttccttcaactacgcccgcagcaatagaataggaaatgattaatccaaatggaccggcgacgacaccggctgcggcaccggcatatgcttccttcctgattttatctacctgactctggaaatagctgcttttttcactaaaatcattggttaactggctatctaacgccagcagtttcccggaagcgttgttgaaactttgactgcttaccagcagggatttttgcgcttcattcagcttcgtgatgccgtcatccagtaccttaatgagaatgtctttctgggcggatgctttcttctcattgtactcatcaaatagcaaaatatacgctgcgagcaattgcgtcgcaacaccacaccattcatacactgtttgggttgcttcaaaatacttatcctggctatccataagtaaggttttaatatcgccgactaaaacggaggctgcctgactatactcctgtttaaagcgacttaactcttttatggtttcatcaaaggtctgccaggggatgacctgatcgagatatttattataaagatctaatgctccatctgcggtttcgattgcgtttttaactacttctaccgttttatctgcaacgatttcagtcataatcattcgcctctttaaatatataaattgtaatgaaactcctgttttacaactattaataaattttacttcatctaattcatagttagccgggcgggatgcgtcaatgtctttatttctattaatatgataaatatcaaacaatgtttaatgtcattatggcgaatgcttctattctattttttagccgggtgatatttttcatttctgctggatgagcgtcgtcgccagaaggccacgtgagcacaagataagagaacgaaaaatcagcagcctatgcagcgacaaatattgatagcctgaatcagtattgatctgctggcaagaacagactactgtatataaaaacagtataacttcaggcagattattatgttgtttatcaagcctgcggatctccgcgaaattgtgacttttccgctatttagcgatcttgttcagtgtggctttcctagtccggcagcagattacgttgaacagcgcatcgatctgaatcaactgttgatccagcatcccagcgcgacttacttcgtcaaagcaagtggtgattctatgattgatggtggaattagtgacggtgatttactgattgtcgatagcgctattaccgccagccatggtgatattgtcatcgctgctgttgacggcgagtttacggtgaaaaaattgcaactacgcccgacggtacagcttattcccatgaacagcgcgtacagccccattaccatcagtagtgaagatacgctggatgtctttggtgtggtgatccacgtcgttaaggcgatgcgctgatgtttgccctctgtgatgtaaacgcgttttatgccagctgtgagacggtgtttcgccctgatttatggggtaaaccggtggttgtgctaagcaataatgacggttgcgttatcgcccgaaacgctgaggcaaaggcgcttggcgttaaaatgggcgatccctggttcaaacaaaaagatctgtttcgtcgctgtggcgtggtttgctttagcagcaattatgagctttacgcagacatgagcaatcgggtgatgagcacgctggaagagctaagcccccgcgtcgagatttacagtattgatgaggcattctgcgatctgacaggtgtgcgtaattgtcgcgatctgactgattttggcagagaaattcgcgcaacggtgctacaacgtacccatcttactgttggtgtggggatcgcccagaccaaaacgctggctaagcttgccaatcatgcggcaaaaaaatggcagcggcagacgggtggggtggtggatttaagtaatctggaacgccagcgtaaattaatgtctgctctccccgtggatgacgtctgggggattggacggcggatcagcaaaaaactggacgcgatggggatcaaaaccgttctcgatttggcggatacagatatccggtttatccgtaaacattttaatgtcgtgctcgaaagaacggtgcgtgaactgcgcggcgaaccctgtttgcaactggaagagtttgcaccgacgaagcaggaaattatctgttcccgcagctttggtgaacgcatcacggattatccgagcatgcggcaggccatttgtagttacgctgcccgggcggcggaaaaacttcgcagcgagcatcaatattgtcggtttatctccacgtttattaagacgagtccatttgcgctcaatgaaccttattacggcaatagcgcgagcgtaaaactgctgacgcccactcaggacagcagggatatcattaacgctgctacgcgatctctggatgccatctggcaagcgggccatcgttaccaaaaagcgggcgtgatgctgggggatttcttcagtcagggagtcgcgcagctcaatttattcgatgacaacgcaccgcgccccgggagtgagcaattgatgacggtaatggatacactgaatgctaaagagggcagaggaacactctattttgccgggcaggggatccagcaacaatggcagatgaagcgagccatgcttagtccacgttatacaacgcgaagttctgatttactgagggtcaaataaatatagcggcaggaaaaaagcgctcccgcaggagcgccgaatggattagcgaccgaacagatcacgttttttcgctttaaacggctgggaaatcaccaccagcactgcgacaatcaggtaagcgataaaaataccgagcagccactgcggcatttccagacctaaaaaatcccactgacgctcggcgcaatcgccagaggcgacaaacacttgcggcacccacttatccagcggcagccattccgggaaacgaaccataaaatcacaggtggcaaacgggctaggatagagctgaagcatggtgtgctcgtaagttaactgcacaccgcggaacgcactatacaaccagataaccatcgctacataacgcagcggagttttcggggcgatcgcgccaatcagcgcagcacccagaacgccgaataacgcgcagcgttcataaatacagagcacgcaaggtttcagtaacatcacatgctggaaccacagcgccgtcagttccagtgccagagcagtaaacgccatcaacagccacgcgccccggccttgactacattggttcaaaaatcgcaacataatcatttccctgcaatatgcatagagtgcgcagtttaaaccaattcattcgctgcgccaccaggaggcagcaaaaataggacgcaattggacaattatcgggcgaaaaggcaaaccgggcatttatatgcccggtaagttgttatcaaagcgttgctatccagcccatttgcataaaccattcggttacaggggcaagcgtaaactcgacgcagagcaagccgacgagtgtcaggacgagggtgtaaggcagggccatccacaccatgcggccataagagaggcgaatcaatggcgcgagtgcagaggtcagcaggaacaggaacgcagcctgaccgttcggcgtagcgacggagggcagattggtaccggtattaatggcgaccgccagcagctcgtattgcttcaacgtgatagcgccactttccattgccgctttcgcttcgttgatataaatcgtccccacgaagacgttatcgctaatggaactcagcagaccgttgaaaatatagaacaggctcagctgagcatgttcgcttgcctgcaacacaaactgaataattgggctaaacagttgttggtcgataatcaccgcgactacgctgaaaaacaccgtcaacagtgcggtgaatggcagagattcggtgaaggctttaccgatagcatgctcatcggtgacaccggtcaaacttgttgccagaataatgacactcaaaccaatcaagccaacttccgccagatgcaacgccagcgcagtcaccagccagacgccaataatcgcctggacaatcagacggattttatcctgacgggtacgctggtggcggctttgatcgtcaaactgttgcaacacttcgcggactttctccggcagcgtttcaccgtagccaaaccaacgcagcttctctaccagcaggcaggttaacaggccacaaatcagaaccggaacggtcaccgggctcatgcgcaggaagaaatcgccaaaatgccagccagccgctttagcgatgatcaggttctgtggttcgcccaccatggtcattacgccgcctaatgcggtgccgacaccggcatgcatcatcaggctacgcagaaagccacggaactgttccagaaccactttgtaatgcttgtcgatatgactatcgtcttgcaggtcggtgtcttcggtacgggaagaggctacgcggtgataaataccataaaaaccgactgcaacgctgatcaccaccgccacgacggttaaggcatcgaggaacgcggagaggaacgcagccgccacgcaaaaagagaggctcagcagcattttggagcgaatgcttaacagcaaacgggtaaatatgaacagcaacagctgtttcataaaatagatacccgccaccataaacatcagtaacagcaagacttcaagatttgccgccacctcttcacggacgtgttccgcgctggtcatgccgatgaataccgcttcgatagccaacagaccaccggggagcagcgggtagcatttcagggccatcgccagagtgaaaataaattccgctaccagcaaccagcccgcgacgaaagggctgatgaggaaaattaacgggtttacgattaagaaaatgatgagggcgagtttgtaccagtcgggggactggcccaaaaaattgcgccatagcgcgcggccccaggagatctccatgatggtttcccttaccttacaaataatcaatgatgtttttatgtttaaacgcaaagcttaacggtcaggcaggagtgaggcaagtcttgatagtcaaggggaaagagatgcggaaaatgaagccttgatccctttttcttctttttgtctgctatcagcgtagttagccctctggtatgatgagtccaactttgttttgctgtgttatggaaatctcactatggtcattaaggcgcaaagcccggcgggtttcgcggaagagtacattattgaaagtatctggaataaccgcttccctcccgggactattttgcccgcagaacgtgaacttagtgaattaattggcgtaacgcgtactacgttacgtgaagtgttacagcgtctggcacgagatggctggttgaccattcaacatggcaagccgacgaaggtgaataatttctgggaaacttccggtttaaatatccttgaaacactggcgcgactggatcacgaaagtgtgccgcagcttattgataatttgctgagcgtgcgtaccaatatttccactatttttattcgcaccgcgtttcgtcagcatcccgataaagcgcaggaagtgctggctaccgctaatgaagtggccgatcacgccgatgcctttgccgagctggattacaacatattccgcggcctggcgtttgcttccggcaacccgatttacggtctgattcttaacgggatgaaagggctgtatacgcgtattggtcgtcactatttcgccaatccggaagcgcgcagtctggcgctgggcttctaccacaaactgagcgcgttgtgcagtgaaggcgcgcacgatcaggtgtacgaaacagtgcgtcgctatgggcatgagagtggcgagatttggcaccggatgcagaaaaatctgccgggtgatttagccattcaggggcgataatcccttccgtttaaagagcaaacccctcaaacgaggggttttttgttgtttttacagatttcccattcttggcgggcaacgttccagcaactcgatgctgccgtcttcgttttgctgttcgagcatcacatcaaatccccacaggcgatgcacatgcttcaggacttctttgcgcccccgatccagcggtgcgcgattatgtggaatataacgcagcgtcaggctacggtcgccgcgcaaatccacgttccagatctgaatattcggctccagattacttaagttatattggctgcttaaccggttacggatctcccgataaccttcttcattatgaatagcggaaatctccagataattatgccgatcgtcatccagcacggtgaagaagcggaaatcacgcatcactttcggactcaggaactggctgataaaactctcatctttgaaatcacgcatcgcgaaatgcagcgtttccagccagtcggaaccggcgatatccgggaaccagtatttgtcttcttccgttgggctctgacaaatccgtttaatatcctggaacatggcgaacccgagggcatacgggttgatgccgctgtaccacgggctgttataggggggctggaagaccacattggtgtggctgtgcaaaaactccagcataaaacgttccgttactttcccttcatcatacagatggttaaggatggtgtagtgccagaaggtcgcccagccttcgttcatcacctgagtctgtttttgcggataaaaatactggctcaccttacgcacaatacgcaggatttcacgctgccaactttccagcagtggcgcatttttctccataaaatagagcaggttttcttgtggttcggacggatagcggcgcgcttcagcaaccgttttctcttcctcgcgcttcggcagggtacgccagagcatattgacctgactttgcagatactcttcgcgacttttctgccgggctttctcttcttgcaggctgattttttgcgggcgtttgtaccggtccacgccgtagttcatcagcgcgtggcagctgtccagaagccgttctacttcatcaacgccataacgctcttcgcactcggtaatatatttacgggcaaaaatcagataatcgacaatgctactggcgtcggtccagctacggaataagtaattgtttttgaagaaagagttatgcccatagcaggcatgagccatcaccagcgcttgcatggtaatggtgttctcttccatcaggtaagcgatacacgggttagagttaatgacgatttcataggccagtccttgctgaccgtgcttatacagccgttcagtctcgataaactttttaccgaaactccagtgcggatagttaattggcatgccgacgctggagtaggcatccatcatctgttcactggttatcacttcaatctggtgcgggtaggtatccagccggtagagtttcgccacccggtctatctctgccagataaacatccagcaggtcgaacgtccagtcgggtccatcgctcaaacgtgtggtgtccttattcatagaatcgatcgtcgccatacgcgcacctcattgttgtcggcgctctctgtgtggagcacctcatttcaagcatagaacacctgttaaaaaccgcgtcgccggagaatttttttctttgcgatttcttattatcagagtgccactaatccgcttctgaacggaattttatgctggataaaaagggcgttcagcaggagatactaaagacgccatattgccgcagagtcagggagatgtgagccagctcaccataaaaaagccgcatgttgaataatattttcaactgagttatcaagatgtgattagattattattcttttactgtatctaccgttatcggagtggctatgcgagttgtcatactgggaagtggtgtggtaggcgttgccagcgcctggtacttaaatcaggcaggacatgaggtcaccgtcattgatcgggagccgggggccgccctggaaaccagtgccgcgaatgccgggcaaatctcccccggatatgctgcaccgtgggcggcaccaggtgtgcctttaaaagcgattaaatggatgttccagcgccatgcgccgctggcggttcgtctcgacggtacgcagttccagttgaaatggatgtggcaaatgttacgtaactgcgacaccagccactacatggaaaacaaagggcggatggtgcgtctggcggaatacagccgtgattgcctgaaagcattgcgcgccgaaaccaatattcagtatgaagggcgtcagggtgggacgctgcaactgttccgtaccgaacaacagtatgaaaatgcgacccgcgatatcgccgtgctggaagatgccggcgtaccgtatcagctgctggaatccagccgcctggcggaagtggagcccgcgctggcagaagtggcgcacaaactgacgggcggcctgcagttacccaatgatgaaaccggagactgtcagctatttacccagaatctggcgcggatggcggagcaggcgggggttaaattccgctttaatacgcccgttgaccaactgctttgcgacggcgagcaaatctacggcgtgaagtgtggcgatgaagtgattaaggccgatgcgtatgtgatggcgtttggttcttacagcacggcgatgctcaaaggcattgttgatattccggtgtatccgctgaaaggctacagcctgaccattccaattgcgcaggaagatggtgcgccggtatccaccattcttgatgaaacctacaaaatcgccattacccgtttcgataaccgcattcgtgttggcggaatggcggagattgttggttttaataccgagctgttgcaaccgcgtcgtgaaacgctggagatggtggttcgcgatctctatccacgcggcggtcatgtcgagcaggcgactttctggactggtctgcgcccgatgacgccagacggcacgccggttgtcgggcgtacacgctttaaaaatctgtggctgaataccggtcacggcacgctcggctggacgatggcttgcggttccggtcagttgttaagcgatctgctctctggtcgcacgccagcgatcccatatgaggatctaagcgtagcgcgctacagccgtggatttacgccaagtcgtccgggccatttacatggcgcacacagctaaggaaacgagatgacccgtccgatacaggccagcctcgatctgcaggcattaaaacagaatctgtccattgtccgccaggccgcgacgcacgcgcgcgtctggagcgtggtaaaagcgaacgcttacgggcatggtattgagcgtatctggagcgcgatcggggccaccgatggctttgcattgcttaacctggaagaggcaataacgttacgtgagcgcggctggaaaggaccgatcctgatgctggaaggatttttccatgctcaggatctggagatttatgaccagcaccgcctgaccacctgcgtacacagcaactggcagctcaaagcactgcaaaatgcgcggctaaaagcaccgttggatatttatcttaaagtgaacagtgggatgaatcggttgggcttccagcccgatcgcgtgcttaccgtctggcagcagttgcgggcaatggcgaatgttggcgaaatgaccctgatgagccattttgccgaagcggaacatcctgatggaatttccggcgcgatggcgcgtattgagcaggcggcggaggggctggagtgtcggcgtagcttgtccaatagcgcggcgactctgtggcacccggaagcgcattttgactgggttcggcctggcattattttgtatggcgctagcccgtccggtcagtggcgtgatatcgccaataccggattacgtccggtgatgacgctaagcagtgagattattggtgtccagacgctaaaagcgggcgagcgtgtgggctacggcggtcgctatactgcgcgcgatgaacagcgaatcggcattgtcgccgcagggtacgccgacggttatccgcgccacgcgcctaccggtacccctgttttagtggacggcgtgcgcaccatgacggtggggaccgtcagcatggatatgctagcggtcgatttaacgccttgcccgcaggcgggtattggtacgccggttgagctgtggggcaaggagatcaaaattgatgatgtcgccgccgctgccggaacggtgggctatgagttgatgtgcgcgctggcgctacgcgtcccggttgtgacggtgtaacttgttgtaagccggatcggaggcaacgtcttctgggtgcaaaaaaatcatccatccggctggtcagcaactgtagttgttaatgtgacagagccattgcccatgatagtgtccattaaaaggatggacactatttccccggaacctgaactcaccgcacaggcgttctacataaaacgcttacgcttcattgttgactcgaactcgacttcagataaatcacgctttacccttgatggagcctgtacatagatttgtgtaattgcctgattttgatatgttcaattcaacatcaaatgaaggttaaattatggacgacaaacaattgcaggctcaggctgcgttcagcaaagcatcgcaaccggcgatagatgcttcattaaatttaagattcagcttcctcttcagccacccgtacgccaatcttcaacacttcattatcttctttctcggccaccgtccagatcatcccggcaaactctacctggtcaccgacaaccggtgccgcgcctaacaactgctggacaatttcacccagcgtttgctgcttatcacgatattctcgcccgtcttccaggccatatatcagcgcaacatcagcatatttggcgctggcttcgagaatgaagtcaccaaagaagcgttgatccagcgcgaccggcgggctctggctgaacagtttaccgagcgccggaagatcgcgttcccgaccaattacacacaacacatcgccttcgcgcagtcgggtgctgccggtaggatgaagcaactggttatcacgaaacagtgccgcaatacgcgtctcttttggcatatgcaaatcgcgcagtgccgcgcccacgcaccatttatcggcactcaattgataaacaaactgctcccacggattttccggatgaatatccaggccaacgcgactcaccggacgtcccactggcggaaccaccactttggcttttttagccgcccagctgagacttgttccctgcaagagcagactaaccagaaccacaaagaaggcgacattaaagaacagacgtgcattctccagccccgccatcatcgggaacacggccaggatgattggcaccgcgccgcgtaatcctacccagctgataaacacgcgctcacgcagattgaaaccgcggaaggggagcaatccagcaaatacgctaaggggacgggcgaagaatatcatccatgcggacaaaatgagcgccggaatggcaataggcagcagatcgcttgggttaaccaacagccccagcaccaggaacatggcgatttgcgccagccaggcgaggccgtcgaaattttgcaggatgccgtagcggttgcgaatagggcgattacccagcagaaaaccgcacagatacaccgccagaataccgctaccttccagcgcagtagttaaactgaaaatcagaataccgccacttaatgccagcaatggatataatccggcgggcagggcgatgcggttgatcatttgcagtagtaaataaccgccgccaagacctattacaatgcccagaccaaattgttgcagaatatcgacaatgaacatccagctaatattgctctcatgatgctggatcatcgcaattagggtaatcgtcagaaagaccgccattggatcattactgccggattcaatttccagcgtgctgccaacacgttcgttaagccccttaccacccagcagagaaaagaccgctgcagcatcggtagagccgacgatagcgccgattaataagccttcaatcaaatcaagattaaacagccacgccgccatcatgccggttaaaccagaggtgataagcacgcccagcgtcgccaggctcagtgccggtcctaacgccacacgaaaggaactggcctgagtgcgcatcccgccgtcgagcaaaataatcgccagtgccaggttacttaccatgtaggcgaaggggtaattatcaaacgggataccgccgacgccatcgactcctgccagcatgccgatcgccagaaaaataaccagaataggaatgccaagacgggaagaaaaactactaagtaatatactgctggtgacaaggatggatcctaagatgaaaaggctaattattgttgtggcatccaacggtcggttactcctgattacgctgtctcttatataaaccctaccatattagcggcagagacagcgttttacttagccctgaagcgtgatttttttacattttaagaacaggatgaccgctaatcgtcaactgagtgccttcccgggtgttattcagaatggcatgtgcgcccaacggcagcgtaaccgtgcgttgttcatgaccaaaatcgaggccggtaatgagtggaatgctcaggcgggaacgcaaaaacgcgtacacactctccaggttgtaacctgcgtcataatcattgggcgtgctgccgctaaagctaccgagaataatcgccttctgacgtggcaaaattcccgcatgatagagctgcaacagcatacgttcgacccggaaagggtgctcgttaatatcttccagcaccagaataccgttctcaatttttggcatccacggtgtaccgatcagactaatcagcatcgcaagattgcctccccacaacgtgccttcggcccgacatgtcgggccttccccttgccattcaatggtgaaggtttcattgcgtaacgccagccagaaatggtgctcggtaaaggcgttcagttcatccgcgccaaagtttgctaccagcatggggccgctaaaggtgatgacattgccatgcgccagaagaccgcactgaatggcggtaaaatcgctatgtccgcaaatgagcaacgggtcatgttgttggcgagccaccagtgcctgccagtcaatatctgccagtaaacgactggcaccgtaaccgccgcgtacagccagcacgatggtgttgggggtagtcagtctggcaagggaattgagatcttccagacgctctgtttccgtacccgcaaaacgctcacaacgacgggcaataacctcgacgttattgacttgatgccccgcgtcggtaaggcgctggataccacgcagcgcggcgtgctgtttaatgcagtaaccgcttggggcaattaagtgaaacagagacatggcaattccttgctgacaacagaaacgaaatgtatatcatgccgcttaggtgtgccgttgtcacctcaacggcgattccaggctataaggatagaagaagtgaaattgagatggtttgcctttttgattgtgttattagcgggttgtagtagtaagcatgactatacgaacccgccgtggaacgcgaaagttccggtgcaacgtgcgatgcagtggatgccaataagccagaaagccggtgcagcctggggcgtcgatccacaattgatcacggcgattatcgctatcgaaagcggtggtaatccgaacgcggtgagtaaaagcaatgccattggtttgatgcagttaaaagctagtacctccggacgtgatgtttatcgccgtatgggctggagtggtgagccgacgaccagcgagctgaaaaatccagagcgtaatattagtatgggggcggcttacctgaatattctggaaaccggcccgctggcaggcattgaagatccgaaggtactgcaatatgcgctggtggtgagttacgctaacggggcaggtgcgctgctacggactttcagcagtgatcggaaaaaggcgatcagcaaaatcaacgatttggatgctgacgagttcctcgaacacgtagcgcgaaatcaccctgcgccgcaggctccgcgctatatctacaaacttgagcaggcactggacgcgatgtaaatcagtcgcgcactttgtccgctttttcccgggcttctcgctcgagagagaaaataatccgctgtaattgccgctccaccgtcgggctgacgttaagaaaacggaagctcagacggggagtggtgatggtttcattcttgccatcaatcactttgcgctcgctgatggagattaactgggcgtcaaagtgaaaaacaccccattgccccatgttgacttcaatctgagcgaagcgcatgccttcttgtaattcggcaggctttgctgtttccagtaatgcgcccatgccgcctaagctcaaatcatacaggcggaaacgtaacgtactgttatccgccagtttggtctggcaaaaataaggcggatggagtggggcggagatgcggaaatatcggcgtcgttgtacaaaccataaggtgggaggcggtacggtaataaatgccggaagctgcaagtattcactctgctgtagttgttcaacagtaaactcgactttcgcaccctgagtttcggcggtaatggtaatgtgctgtgcctttagcacggcgatgttgtcttcggcttgactgccgaaatccagcaccagtttatccggggttattgccagtaatttgctgatcagctgcccgccattccaactgagacgcaaaggaattgcggctttgtgcaaatcgcgtaacacgcccaggacggctaacggattttgtttcaggaactgctcatggtaatgactcacgcggaaaaactcctgactgacaaactgtctttggtttatcggtcacagttaacaaaacttaatacaaatgcgtgaatattttttacatgttgttcttaaatcagccgacatacgcccagcatcgatcccgcccttgcctatacttagagcgttgatgtaagcatttcttgcgtccgattcatcgaaacgagggcctgaacatgggaattattgcctggattatttttgacctgatagccggcattatcgccaagctaatcatgccggggcgtgatggtggtggatttttcctgacctgtattctcgggatagtcggtgcggtggtcggcggctggctggcgaccatgtttggcattggcggctccatcagtggttttaatctgcacagcttcctggtggcggtggtgggagctattctcgttctgggcatattccgcctcctgcgaagagaataagattttcataaggcggatagcgatacagatgccgctatccgctttcacatcagaacgtatactcgacacctgctttacgggtgaaaaaaatcaatatagcacttcgatatccgataaagtcggttcccggtaacaacaacagaatccttttttaattattgtttcgttgtttttggtgtgattcagaaaataaatattttagacagtagccagagtggcgttaaaaatggggcggatagtgaggcggttttggctgcgcttattgaacatttagaattgatcaatccttctggcagattaagccaaaatacccgtagcgcaatgcttcagttacgcgaagaggaatggtctgaattctttttttggttgctaaattctctggagtgtctggattatgtgattattaatttaactccagaaagcaaaaaaacgttgatgagtgaacaccgtaacaatattcaggtagcaattgatgctttatatagccaacgtcggcgtaaaagcccgggtgatgaaagtgaaacacttacccgtagaaatgacgctatcttcggcaaccacgtatggcaaacatttgcgcaatacttcccgccaggacttgaaaaaccgtctgtgtaaaaaaaaccatagctatggtgttatctgccgacaacgccatccggagaagccgaatgacgttgtcggagtaagcgctggttaaggtgtgggttgtgcctctttggtactgggttgcgtcgttgcactcttaacggtcggacgcgtcgccggaacattgtcacacggttgctctttcgggcagatcaaatccagcattttcagcgtcacgccattggtccagccaaagccatcctgtaatggatattcgccaccgccgccccccgttccggtggtgctgacatcatatttttccaccagctttttctcccggtcataggtgtgctgaacattggtcaggaagtgccagctaatgtccatcgccacctctttttgcccgtagttttgtaatccttctgtcgcgacccactgtaacggtgcccagccatttggcgcatcccattgttgcccacttttcacgctcgtggtgttcaggccgccgggttgcagcagatgtgttttcgtcgccgtcgccattttgttggcgcgatctttcgctgccgcattgacgtacagcgggaacagggcggccgcggttaactgattgcgcactttatgacttttcaggtcgtaatcggcataccagccttgttgatcgttccacaggtatttttcgatccctttttgacgggcatttgccagcgtttcgtactggtttgccatcgcgttatctccggcagctttgctggcgcgggcgaggattttttccattttaaacatcaggctgttcagatcgaccggtacgatgctggtggtgcgtaaggtatttaactgctgcgggttgtccatccagcggctgctgaaatcccagccagacgcagcggcagagcgcaggtcgcggtaaatttcagtggcaggtcgattcggattgcttttggcggtggcaatatcttccacccaactctctggtcgtggcgtatcgcgatcgtcccagtagcggttgagaagggtaccatcctgaagtttgacaacgcgtttttcctgttgtccggcttgcaggttttcaacaccgtccatccagtaagcatattctttttgcatttgcggcaggtattgcttcaacgcggcatcgccttcatgctgcgccagtaactctaccatcagggcaaagaagggcggttggctgcggcttaaatagtaactgcggttgccgttgggaatatgaccgtaagtgtctatttcatgagcaaaattggccaccatatccgcgactttatcccagtgaccgctttcggcaagtcctaacatggtgaagtaactgtcccagtaatatacctcgcgaaagcgtccgcccggcacgacataaggttccggcagcggtaacagagaatcccatttttcggtgttttcggtagaacgcgttaataccggccaaagtccgtcaatatgttcgcgcagactctgcccctctggcggaacatatttctcgccttctttcggcagggtgaaattgacgttaacgaaatggcgcagatcaaatccgctctggttttgctgcatccgataatcagcaaggatcatcagcggatcgctgttcggcacggcatcggcaaaggttttttggtccggaaaaagtttggcgttttgcacatcattaaacagcggccctaataaaatatcaggcggctgtggtgttaccggtgtttcttctgcctgcacgcttagcgcagcgaaacacaaaaagatacaggctggaattaacgccattttttgcgggcgagaaggtgcgggggatttcatcaatcattctcctttggcgaaaccgaataaaacggtattcaagtatcagaaaaccttagttcaggatcgcactagctgcatgatcgaaatctcattctgcgaactgtcaggcattttagaaaagggaattaaagggataaataacggcgaaatagagtgatcaaataacgtctgtttattagccagccagcggcgttgggttcgtgattagcgaagaaaaatcatcataaattggtgaaaaatataacaggtagttaaaaaccattagtgctgagtaaattgccggatgacatcagaacgatgccatccgaacagtggcttaaccctgacggttgaaacgttgcgttttaacgtccagcgttagcgtttcttctggttgtatcgcatacagtttctcaccctgctggcaaatccagccaatccccagttcacgggcgattagggcgctgtgggataccggacttccggcgctaaggcagataccttttacaaccgccggatccagttgcagtactgtggaaggataaatgttctccgccagtagaatagttgggctgttaaactgcgggagttcttctttcgtttgggtcaggtggaccagggtgcgatgcagaagatcgtccacatcaatatagcgagcttgtagatattcatcatccagttgctggtattgctggctaagttctttaagaacttgctgccaggcatattctgccgtgcaatgttcatgctgaaggagttcgcttgccgccgccagcagttccggatcatctaacagtgtatggtgaccagaaaagattgcggcaatatcgtcaagcccgctggcttctgctttcgctgttaacgtcatcagatctaataacgtgaagtcaatagcctggcgtaatcgatcttgttcttcttccacggtcagggtactttttgcctgtaccgtacataaaactggttgataataaaaggctttaccgctaacaggcggaacgggacgcagagtaggtggagcgacttcctccgtttcaccaaagttatcttcagccagctgacggaaagcgatcagtgcctcttcagcttctggccctttcgcaatcaggcgcagcgtatcgttatagcgaacttgtagtaacgcaatctggttaatactctctggtgtgacgcatttgccgtttttttccagcaacatatcggcattaaatgtgcttaaggtataaaccagccgggaggccggacgtacatgcaggccgttacggttttttatgaccaccgccagagaacgggcttcttcatcgtacgcaggacatgtgtcagagatttcagtgtcggaggacggtaaacccagttgttcacgtttggcttccagcgcatgcatggcgtcaaagataactttgtcgatatccgccccgctggccgcgctgaccgttgctgccagtgtaccttcgaccaacggcgcagcacacaaacgtacttttgcggcgatctcgggagccagcaattccagcgcagtttcagcactcaataatgcgctacccatatccatcatgaccagcacatggtcggcatcagcaacagattcgatggcctccatcactttgacggcatcggtaccaatgggattttgtggatcgtcaattcccgcggcaatggcgattttacaactatcactcattaacatctgacgggctaattcaccgacaccttctcccagtcggctgctatgactaactatgaccaggtttaccatcaccaattccttactcttttgcggctaacgccaacatttgcatcataaacatcacgctggtcgcgccgggatcctggtgaccaatactgcgttcaccgagataactggcgcggcctttgcgggcttgcatcgtaatcgtactttgtgcagcggattcggcgatgctactggcagcttcgagcgccaccggaacagagagattttgctcgctggactgacgtaagctttccaccaccggcacccacacatcacacatggttttatcgccaggttcggctttcccgcgactgattacgccgtccgcgccatcgcggaacatctgataaagctcttccagtgtcaggctttgccgtgcctgggtcgcctgtgcggcgcggataaagaaggtaccgaacagcggaccactggcaccaccgacgctggaaagcagcgtcataccggtattcttgagaatgaaaccgatatctttatctgcgatagcagggagtttttccaccactttgctaaagcctcggttcatatttagcccgtggtcagcatcgccaatttcgcgatccagtccggtaagatactcgctctcggtgctgaaaatatcgccacaacgagtgagccagttaacaatttgagttctgctcagactcattgctttctccttatttaccccagttaagggccggggtgtggaccggggcgtcccagagtgccagcgtttcgtcatcaactttcagtaaggtgatactgaaaccggtcatatccagactggtgcagtacgcgccaattaaattacgttcgatagtcaatcccgcttgctggcaacgtgtggtcaggcggttatagacgccgtacagctcagaaagcggagttgcgccaagattgttaaccagcgcaatcacccgatcgccagactggagcggttgtttggtttgttgttcttcctgccaactgccttgttgataatcccagaaacgcaaagtgcgatggtaactgccatttaccagcagggtgtcgaacatttcatcgacggtttgatcaagggaagagaaggggcggcggtcaatacccggctcaccatgaatgccgacgccaaactccatctcattatccgccagggtaaaagaaggtttgcccgcggcaggaacggtacaggcaccgagagcgatacctatactgtggccttgattattcagcttacgccccagttccgcacaggcgtccagactgtcgccacgctccgccgctgcgcctacgagtttttcaattaatacggtgttggcaacgccgcgtcgcccggcagtataaagactgtcttttaccgcaacgtcgtcatcaatgaccacagtggtcacttttacgccgctatcgtgcagtaactcggtcgctgtttcaaagttaagaatatcgccggtgtaatttttgataatcaacagtacaccttcgccgccatcaacttgcatggcgcattcaaagattttatcgggcgtcggactggtgaaaatttcgcccggacaggccccgctaagcatcccctgaccgatataaccacagtgcatcggctcgtgtccgctgccgccaccgctcagcagggcgacttttcctgcaacaggggcatcagctcgggtgacatacaccggatcctgatgcagtgtcaggcttggatgcgctttcgccagtcctgccagttgttcgtccagtacgtcttgcacatcattgatcaattttttcattattttgctccagcaattacggtagggcatggatgatgttcaacgacacggcgaccactgactgccgatgaatccattgtgcatcaggcaagggaaaagaaaattagcccaaattatgtttcatagtgaaacatatgctttaatgaatgttccatattgaaacttttacgtgtattaatacttaaaattgcgagccggaacaccttttgtcataagggatgcgggatatgagtggcgcttttaacaacgatggtcggggcatatctcccttaattgcaacctcctgggagcgatgcaataagctgatgaaacgggagacatggaacgtaccacatcaggcccagggcgtgacatttgcttctatttatcggcgtaagaaagcgatgctgacgctcgggcaggctgcgctggaagatgcctgggaatatatggcaccgcgagagtgtgcgctgtttatcctcgatgaaaccgcctgcattctcagccgtaatggcgatccgcaaaccttgcagcagctaagtgcactgggattcaatgacggcacgtattgcgccgagggaattattggtacttgtgcgctaagcttagcggctatctctggtcaggccgtgaaaacgatggccgatcaacatttcaaacaggtactctggaactgggccttttgtgcaacgccgttgtttgacagcaagggccgattgacgggaacaatagcgctggcgtgtccggttgagcaaactaccgcagctgatttgccgttgacgttggcaatcgcccgcgaggtcggaaatttactgctgacggacagtttgctcgctgaaactaaccgtcatttaaatcaacttaatgccctgttagaaagtatggatgatggcgtgattagctgggacgagcagggtaatttgcaatttattaatgcccaggcggcgcgggtcttgcgccttgacgcgacggcaagtcagggacgggcaatcactgaactcttaacgttacccgccgtattgcaacaagcaataaaacaggcacatccgctcaaacacgtagaagcaacctttgaaagccagcaccagtttattgatgcggtgataacccttaaaccgataatagaaacgcagggaaccagctttattttgttgctccatcctgtggaacagatgcggcagttgatgaccagtcaattaggaaaagtcagccataccttcgctcatatgccacaggacgatccgcaaacccgccgcttgattcattttggtcgccaggcggcgcgcagtagctttcctgtcctgctttgtggagaagagggcgtgggcaaggcactgctaagtcaggcaattcataatgaaagcgagcgtgctgcaggtccttatatcgccgtcaattgtgagttatatggtgatgctgcgctggcggaagaatttattggtggcgatcgcacggacaatgaaaatggccgtctgagtcggctggaactggcacacggcggcacgctgtttcttgaaaagattgaatatctggcggtggagttacagtctgctttgcttcaggttatcaagcagggggttatcacgcgactggatgcgcggcgtttaataccaattgatgtcaaagtgattgcaacaacgaccgcggacctcgcaatgctggtggaacaaaatcgttttagtcgccagctgtattacgcgctgcatgcatttgaaattaccatcccgcctctgcgtatgcggcgtggcagcattccggcgctggtgaataacaaattacgcagtcttgaaaaacgcttctctacgcggctgaaaattgatgacgatgccctcgctcgcctggtttcttgtgcatggccaggcaacgattttgaactttacagcgtcatcgagaatcttgctctgagtagtgataacgggcgcattcgcgtcagtgatttgccggaacatctgtttaccgagcaggcgacagatgatgtcagcgccacccgcctttccaccagtctgagttttgcggaagttgaaaaagaggcaattattaacgcagcccaggtcacaggcggtcgcattcaggaaatgagcgctttacttgggatcggccgcactacgctgtggcggaaaatgaagcaacatggcattgatgcagggcagtttaagcgccgggtatgaaagacagaaacgatttctgatacatcagagtgatctgtatttcattccggcgcacgctaacaattttcagcatcgtttaagggcttgtctatcccgcacttaaaagctgaagcgatatcctccgttgacttgcttctgatcaaagaggttaccctgcgtgtaatccgcttcgagatagaatgtgtgctgtttgttatactgtgcactgactcccacgccgttattccagccattacctttgaaactgtacttctcccgggagttgttcaacagatattcggtatccccactaaactcgcggatagcgccagtcttcacatagacattcagctggctgttgcctgcggtgatgtcataccccagtatcatgctggcacgccccagcaggctttcgtagtgattcagatgtatattgaggccattactcgccttcatagtcatctcattctggtggctgtatgtaagctgggtttgcggctctatatagaacccataaccagtaggggacaggttgaacctctgcccggcttccagggagatgctcattccattcgcagtgccgttggcgttaacgccgttgttctgactgtccagtacgtggaaactatttttctggcggcttgcttttataacgagatcgctgtaaaaaccgttttgtgccatgtaactggcgtacattcccatgtagtcactacgtgcggtaccgtcgcctccgctatagtccgggcttgcatgtgtactgccaatatacagaccgacatacaacggcattacatcagagagacgtttatccccaccaaactggataccgctgtaacccatgtcaaagccgctcagtttgccactggcaaaggagtccaggcttcccccataactgcgcaaccagatattaccgtctttactctgatttcgcaggtcacccatccgttgcatcagcgtacggttttcaacatagttcaataagtaaccgacattgagataattgccgccagcatctgcggtcgtggtgggtttaggcgtgggagcgggttcaggcgtaggatcggggttgactatgggaggctgagcgggagctggtgtgggttcaggattaggagtcggttccggaactgtcccggaagcgtaaagctcccagttagtgccatttttacgcacatcgtacagatatccccccaactcaacctgagaagacgcgctgaagctggccgcgccgtcagtggtttttaccactgtcagaacttcatttcccgttgtggcctcgctgccctggttgcggatagccaatacgtgattaccagcactactcccgctgatattcaataaatcccctttattattaacgccattaccctcgccaacaacatcagcacgcataataaaggtactgttaccgctcaggttctctacgtttaatgtggcaaatgtgccggcagtactcccgtggctggcaaaatcgacagtactatggctcagcgccagcgtgtcgagattagaattacttgttacgttccagacgctgttattcattgcaacgtccagttttccgccattgacattatcgctgagggaggaacctgtccaaacgttcccagggtgcatatccagattgattagcccacctttggaaagaacgctaccgttgataagcatacgaccgctggcgttgatgcggctggcggcataaccatcgtcatgttgcgttgcgatggccatctggtcgggtgtactcatatcaatgaccagatcgctcgtgaggtcgatctggctgttggtcatggcataaattcccctggctcctgccgcgccggtgatagccaaactgtctccggttattctaccgccgctgagagcccacaaacccagcgccagactgccattacgatcaactgtaatatcggtattttgcatgttgacaacagccgttgccgtctgggcgctggcaccataagaaccgccggaaaagatgctgtttcgttgcgctgccgtgccagtaaaattgattatcgcgtcactaccactggtgacgaggccaccgccctgcgcggaagaaatatggctatctgcaccgatagtggttgtaccaccacgaacttcgacgccattggccgcggctccagttacatcaacagtgagtgcattcgcgctaacctggccaaagctccagaggccgtgagcattatcgccattggttttaatggtactgtttgttccgagatcgacaacagagtttttctgtacgtttatccccatggcgctgtagccctgaacatcgattgtcaggtctgtagccgtaaaacgcgcagcaccattggcgttattgccgttgagaccaccgatataaacacctgtacttccatcggtcgtgattttacttccgcttccaagatcgacactggtgccatagtcattgatggttaggcctataccgttgctgttttcaatggtgaattgagtggctgttagtgtactgctatgcccaataatgatgccgtcatcgttactcttaatggtgctgcctgtgcctaagtcagcatgggtatagtcaccaattaagttaatgccgatggcagaggtttgaccaacaacatctactgtgagtcggttagctgtcagggagctgtttttgccctgaataatgattccttttgcatatccagaggcgtcgttgacattgacggtgacatcattacccaggttgatattgccaggcgtgtttcctgctggggtcattacaccatagaggtttccacttggatcggcggtatctcctgtaattctgtcaccatcattaatagtaatattggtgccatattgacttcctgtatcagcagctatcagcaggggggaaaagataattgcattcaaaccaatagcgccaaattttatcagttgaatactggggctacggatttttaattcagcgagacgatctgctttggtattcccattgtgttgtttgatgcccataccactcctatatagtacccagactatgggtctatggattttgtcattttgtttaaatcaatgaataatatcctcttatcatcatgatatttgtatggtgcaatcatgatgagcttctcagagaataattctctattaccgggcaaaatcaggaacacaggaattaatatatatttaacatcccccttacaaaggtgagtttatatcgagttattccctaagttgtcgttacttattccaattcgttactataaatatggcaaaaatattacaacaaacagcggttaaaaaatttggtgaagattttttgtaataatcctaattagttatgggaatttcgcttgatgtatctgcataacaaaaacaatatgcgccatttttgcattactaataagaaaaagcaaaaaacatcgatattcatttttggtcaatgggttttctggcctatcgttgttattgtgctactggttatcattttcatcttgccagcatattggagcgtgatcaattttgatcagctgtgaagggggctgatgtgtagtgatacaaaaacttacgttatatcactgctaatgagatatccggcatctgaacacttatgtctttaattattctcgtggttcactataggcaataagcacaaaagtgtaggatgttacaagaatgattaggactcggtgaaatgaaaaatccacgcaattgcgtggattttatatacttttgcgctcttcatgagatttagcgaaacctcatgagacaataaattaattagacgttgaaaaggaagttcatcacatcgccatctttcacgatgtaatctttaccttctgcacgcattttgcctgcttctttcgcgccttgttcacctttgtaagtgatgaaatcttcaaagctgatggtttgtgcacggataaagcctttttcaaaatcagtatggattttgcccgctgcctgcggcgcggttgctccaaccggaatggtccatgcacgcacttctttcaccccagcggtgaagtaagtttgcaggttcagcagtttataaccggcacggatcacacggttcaggcccggctcttccagcccaagctcctgcataaactcgtcacgttcttcgtcgtccagttcggcaatgtctgcttcaacagcagcacaaaccggaaccacaacagaaccttctttcgccgcgatttcacgcacctggtcaagatatgggttgttttcaaaaccgtcttcgttgacgttggcgatgtacattgttggtttcagcgtcaggaagctcaggtaacgaatagccgctttctcttcagcgcttaaatccagcgcgcgcagcatacctgcattttccaactggggcaggcatttttccaggaccgccagctcagctttcgcgtctttatcgccacctttggctttcttctgtacgcgatgaatcgcacgttcgcaggtgtcgaggtctgccagcgccagttcggtgttgataacttcaatatcgtcagccgggttaactttgccggaaacgtgaatgatgttgtcattttcaaagcagcgaacaacgtgaccgatcgcttcggtttcacggatgttggtcaggaactggttacccagaccttcgcctttgcttgcgccttttaccagaccggcgatatcgacaaattccatggtcgtgggaagcgtacgctgcggttttacgatttcagccagttgatccaggcgaggatcaggcattggtacgacgcctgtgttcggctcaatggtgcagaatggaaagttggccgcttcaataccggctttggtcagcgcgttgaacagggtagatttcccgacgttgggcaaaccgacgataccgcatttgaatcccatgatttaaatcaccttaatatcttaataatcaacctgttattgctaacagattgcagaaatggaaataactttgcctattatacacggcactcggcaaaaatgccgcagacaacgacttattgcgctttaaaggcgtgcaatcggttcgttgctttggtcaagccatctgtaaaccacatttcagtacaacgcgccgcttcgtcaatggcttcatcaattaacttctgttcactaacaggcggtttgcctaacacaaaaccgacaactttatttttatcgcccggatgaccgattccgatgcgtaaacggtgaaagttagggttattacccaatttactgatgatgtctttcagtccattgtgaccaccatggccaccgcccaatttaaatttggcgacgccaggaggcagatccagttcgtcgtgggccaccagaatttcgtccggattaatgcggaaaaaactggccatcgccgcaacggctttgccgctgagattcataaatgtagtcgggactaacaggcggacatcttcgcctccaagagtgactcggctagtataaccaaagaatttagcctcttcgcgcagcggagcgcgcaaacgctctgccagtaagtcaacgaaccaggtaccagcattatgtcgcgttgcggcgtattcagcaccggggttcgccaggccgacaatcaatttaatcgtcacgtttttttgtcctgagtgtgtacataactggcgcgtagtttactggttgcggccccgcttgacaaaaaactgcgtatcaaatgcagataacgtaataattgcctgagtggactattagaaagtcaaggtgttcaggcgtttatttgtaaagttttgttgaaataagggttgtaattgtgatcacgcccgcacataacccactgggtgttgtctatactttacacataaggaagaggggtattccctgttacaacccagaaagttccggaggtgacatatgaaacgcaaaaacgctagcttactcggtaacgtgctcatggggttgggtctggtggtaatggtggtcggcgtggggtatagtatcctcaaccagttaccacagtttaatatgccccagtatttcgcacatggtgcagtgctaagtattttcgtcggtgccattctctggctggcgggtgcccgtgttggcgggcatgaacaggtgtgcgaccgttactggtgggttcgccactatgacaaacgttgccgccgtagcgataatcgccgtcatagctaacaaataatgcagtttgctgaccagtcagtttgcgctgactggtcaatctcgtacttataaatccgccatcgccgcgcgacgattcgggaagaacgccaggcgtcccgggatcggttgaatgccagcgcgagccatagtgcgcagtggctggaattccacgttgcacacgcgcagttcacatccctcgggcagacgcttcacaaaacgctggaacgcatcaagaccaccagcatcaagtaccggaacggcatcccacttcagaatcacaatccgtttgccttcaagacgactctccaggtccgtgaataagccttcagcagcagcaaaaaacagcgggccaataacgcgcagaaccaggacatcgtctggaacatctacgactaccggtgccaggcgagtcatacgtgcgatacgacgcataaacagcaggcttgccagcacgatccccacgctgatggcaataaccatatcaaacaacacggtcaggctcatgcacagcagcatgacgatgatgtcatctttcggcgcatgacgcagcaagtcgaccactttgtgcgcttcactcatgttccacgccaccatcaacagcagggctgccatggcggaaagcggcagccaggagagcagcggtgccagtaccagcagggcaagaataaccagaatagagtggatcaccgcgctgataggggacgttgccccggcacggacgttagcggcagaacgcgcgatggcagctgtagcggtaataccaccaaagaacggagcgataatattccccagtccctgtccaaccagttcgctgttcgccttgtgtttcgtcccggtcataccatccagcaccacggcgcagagcagagattcgattgcgccgagcattgccatactgaatgccgcaggcagcagtgtgcgaatagaatcccaggttagcgtgaattcactattaggcagatcccacggcagcaccagttgcggcagcagttgcggaataccgttaccctgagaaccatcggccaggacgtagtggaattggctaccgatggtagcaacatgtccgccgagcaggttaacaatccccatcaccgcgcaaccagccagcaaggccggaaggtgaccgggtaaacgaatgcccagacgcggccaaaaaacaagaatacctagcgtcacaatgccaatggcagcatcacccacattaatggtcggcagcgccataaataatgcgccgactttttgtagataatgttccgggacatgggccatttgcagaccgagaaaatctttaatctgcatggtaccgatggtgatcccgataccgctggtgaaacctaaggtgacggaaaccggaatatactcaatcaggcgaccaaagcgtgccagacccatcagaatcaaaaagatcccgctcagcaaggtcgcaaccagcagtcctgccagtccaaactgttggctcacgggatagagaattaccacaaatgccgcagtcggaccggaaacgctaaagcgactcccacccgtcagagcaatgacaatccccgcaacagctgcggtatataaaccgtactggggtgccacaccactaccaatagccaacgccatcgccagcgggatagcaataatcccgacggttatcccggcaatcaggtcacgggtaaaccgtgcggcagtatatttttctttccagcaagcgtcgatcagagcgcggaaaggcatcacatgactggaaaatattttgttcacaataatgtttcatccgtgagcgcatcatctgtcaactaaatggcaggtgaaggaggcataggtcatacaaatggatattacagacaaaaaaacccgccgcagcgggtctttgagccgggttcgattagtgttcgaacatggcagagatgctttcttcgttgctgatacgacgaatcgcttcggccagcataccactcagggtcagagtacgcacgttcggcagacttttgatttcatcgctcagcggaatggtatcgcagacaacgacttcatcaattacagagttacgcaggttgttcgccgcgttgccagagaagatcgggtgagtcgcgtacgcaaatacacgtttagcaccacgttctttcagagcttcagcagctttacacagcgtaccgccagtgtcgatcatatcatcgaccagtacgcagtcacgacctgcaacgtcaccgatgatatgcatcacctgactaacgttcgcacgcggacgacgtttgtcgatgattgccatatcggtatcgttcagcagcttagcgatagcgcgggcacgcacaacgccgccgatgtccggagaaaccacaattgggttatccagattcagctgcagcatgtcttccagcaggatcgggctaccaaatacgttatcaaccggaacgtcgaagaaaccctgaatctgttcagcgtgcagatccactgtcagcacacggtcaacaccgacgctggagaggaagtctgcaaccactttcgcagtgattggtacacgagcggaacggacgcgacggtcctggcgcgcatagccaaagtaggggataacagcggtgatacgacctgcggaagcacgacgcagggcatcaaccataacgactaattccatcaggttgtcgttagtaggggcacaagtggactggatgatgaaaatatcaccaccgcgtacattttcattaatttgtacgctgacttcgccatcgctaaagcgacctacagcggcgtcgccgagactagtgtacaggcggttggcaatacgttgtgctagttccggggtggcgttaccagcaaaaagcttcatatcaggcacgagaagaacctcaggcatgcgtccattggtggaaagaatctgccgaaaactgtgcgggccaggcatgatcctttccaggcggtgtattaaagagcgcgatgcaacgtctggaacaaggtgacgttgtcaccgaaactcagcttgcccggcttaaagcatggctctgtgcaatggggaaagattagcgcctttcgccacaaagccattgagccattccggggcttgctctagcacctggcgggcttcagactctgtatcaaattcagcaaagacacaggcccctgtcccagtcaggcggctcggggcgtattctaacagccaggaaagcaccgcatcaacctcgcgaaaacgttttcttgcgataacctcgcaatcattgctgaattcacattttagcaacgtttctatactcctttttggcgtattgcgcgggagttcaggatctttaaaaatcaccggagtcggaatacttacaccagggtgcgccaccagataccacttctctggcggatccaccggcgttagtatttcaccaacgccttcggcaaacgcggcatgcccccgaacaaagacaggaacatctgcgcccagcgtcagccccatttccgccagctcatccatgcttagcccgcattgccagagatgatttaatgccaccaggaccgtcgcggcattggaactaccaccgccgagaccgccgcccatcggcaaacgcttgtcaatgctgatattcgcaccgcttcccgtcggaagacgcccgctgtctgccgcagttttcatcaacaatcgcgctgcgcgaacgatcaggttatcttcatgttccacgccttcaacgggcgttaacagacgaatatccccatcgtcacgaagctcaatgctgatggtgtcgccgtaatcaagaaactgaaacagcgtttgcagcgtgtggtaaccatccgcacgctgaccggtaatgtataaaaacagattaagttttgccggagagggccactgtgtccgcattatttcactatccagttatccatttttaacttgatgcgttgaccaccgtcggtgagttccatattggctggcatcgcaggttgcgttttggtgtcataaccaccataaacaaccttccagtttttgccattctggctgtaggtaatttcgctcaggcggtactggtcgtccagtttgtagtcggttgcatcacccggtaaacctaaaatccactggcgcaagctgttgagcggaattggcattccggtcaatttgccaatcatctcttcggcgtcatcggcggtataacgctgacctttattgtcgactaactgcacgttacccggttgagcattcagctccagttccgtgctgcccaatgggttagtgagcagcagacggtagcgatcctggccggtttgctgccagaaaaagcgggcgtacactttttgttggtcagaaatataagcgaacgcgccgcgagtctgatactgattaagattgcgcacgtcttgctgatgctgacgccattgtgggctatccgggcttttgccaggacctttgggcgtggtaacggaacaggcagtgagcacaagagcagccagcggtagcaggcggataagacgaaaatcgggcaggggcatagtgatgacaagtccttgagatacgttgcagttataacccttaatgctagcgttaccgtccgctatcgtctatgttcaagttgtcttaattgccagaatctaacggctttcggcaattactccaaaagggggcgctctcttttattgatcttacgcatcctgtatgatgcaagcagactaaccctatcaacgttggtattatttcccgcagacatgacccttttagcactcggtatcaaccataaaacggcacctgtaagcctgcgagaacgtgtaagctttagcccggataagctcgatcaggcgcttgacagcctgcttgcgcagccgatggtgcagggcggcgtggtgctgagcacgtgcaaccgcacggaactttatcttagcgttgaagagcaggacaacctgcaagaggcgttaatccgctggctttgcgattatcacaatcttaatgaagaagatctgcgtaaaagcctctactggcatcaggataacgacgcggttagccatttaatgcgtgttgccagcggcctggatagtctggttctgggggagccgcagatcctcggtcaggttaaaaaagcgtttgccgatagccaaaaaggtcatatgaaggccagcgaactggaacgcatgttccagaaatctttctctgtcgcgaaacgcgttcgcactgaaacagatatcggtgccagcgctgtgtctgtcgcttttgcggcttgtacgctggcgcggcagatctttgaaagcctctctacggtcacagtgttgctggtaggcgcgggcgaaactatcgagctggtggcgcgtcatctgcgcgaacacaaagtacagaagatgattatcgccaaccgcactcgcgaacgtgcccaaattctggcagatgaagtcggcgcggaagtgattgccctgagtgatatcgacgaacgtctgcgcgaagccgatatcatcatcagttccaccgccagcccgttaccgattatcgggaaaggcatggtggagcgcgcattaaaaagccgtcgcaaccaaccaatgctgttggtggatattgccgttccgcgcgatgttgagccggaagttggcaaactggcgaatgcttatctttatagcgttgatgatctgcaaagcatcattagccacaacctggcgcagcgtaaagccgcagcggttgaggcggaaactattgtcgctcaggaaaccagcgaatttatggcgtggctgcgagcacaaagcgccagcgaaaccattcgcgagtatcgcagccaggcagagcaagttcgcgatgagttaaccgccaaagcgttagcggcccttgagcagggcggcgacgcgcaagccattatgcaggatctggcatggaaactgactaaccgcttgatccatgcgccaacgaaaagtcttcaacaggccgcccgtgacggggataacgaacgcctgaatattctgcgcgacagcctcgggctggagtaacagtacatcattttctttttttacagggtgcatttacgcctatgaagccttctatcgttgccaaactggaagccctgcatgaacgccatgaagaagttcaggcgttgctgggtgacgcgcaaactatcgccgaccaggaacgttttcgcgcattaagtcgcgaatatgcgcagttaagtgatgttagccgctgttttaccgactggcaacaggttcaggaagatatcgaaaccgcacagatgatgctcgatgatcctgaaatgcgtgagatggcgcaggatgaactgcgcgaagctaaagaaaaaagcgagcaactggaacagcaattacaggttctgttactgccaaaagatcctgatgacgaacgtaacgccttcctcgaagtccgagccggaaccggcggcgacgaagcggcgctgttcgcgggcgatctgttccgtatgtacagccgttatgccgaagcccgccgctggcgggtagaaatcatgagcgccagcgagggtgaacatggtggttataaagagatcatcgccaaaattagcggtgatggtgtgtatggtcgtctgaaatttgaatccggcggtcatcgcgtgcaacgtgttcctgctacggaaagccagggtcgtattcatacttctgcttgtaccgttgcggtaatgccagaactgcctgacgcagaactgccggacatcaacccagcagatttacgcattgatactttccgcagcagtggggcgggtggtcagcacgttaacaccaccgatagcgcaattcgtattactcacttgccgaccgggattgttgttgaatgtcaggacgaacgtagtcaacataaaaacaaagctaaagcactttctgttctcggtgctcgcatccacgctgctgaaatggcaaaacgccaacaggccgaagcgtctacccgtcgtaacctgctggggagtggcgatcgcagcgaccgtaaccgtacttacaacttcccgcaggggcgcgttaccgatcaccgcatcaacctgacgctctaccgcctggatgaagtgatggaaggtaagctggatatgctgattgaaccgattatccaggaacatcaggccgaccaactggcggcgttgtccgagcaggaataatggaatatcaacactggttacgtgaagcaataagccaacttcaggcgagcgaaagcccgcggcgtgatgctgaaatcctgctggagcatgttaccggcagagggcgtacttttattctcgcctttggtgaaacgcagctgactgacgaacaatgtcagcaacttgatgcgctactgacacgtcgtcgcgatggtgaacccattgctcatttaaccggggtgcgagaattctggagcttgccgttatttgttagcccagcgaccttaattccgcgcccggatacggagtgtctggtggagcaggcactggcgcggttgcctgaacaaccttgccgtattctcgatctcgggacgggtaccggggcgattgcgcttgcgctggctagcgagcgcccggactgcgaaattatcgctgtagatcgtatgcctgatgctgtctccctggcacaacgtaatgcccagcatctggcgatcaaaaatatccacattctgcaaagcgactggtttagcgcgctagccgggcagcagtttgcgatgattgtcagcaatccgccgtatattgacgagcaggaccctcatcttcaacaaggcgatgtccgctttgagccgctcactgcgctggttgcggcagacagtggaatggcagacatcgtgcatatcatcgaacagagccgtaacgcgctggtatccggcggctttctgcttctggaacatggctggcagcagggcgaagcggtgcgacaagcatttatcctcgcggggtatcatgacgtcgaaacctgccgtgactatggtgataacgagcgcgtaacgctcggccgctattatcaatgacaagtttttctacactgcttagtgttcatcttattagtatcgcgctttctgttgggctattaaccttacgtttctggctacgttatcagaagcatccacaggcatttgctcgctggacgcgcattgtgccgccggttgtcgatacgctgttactgttaagcggcattgcgttgatggctaaagcgcacatcctgccattttccgggcaggcacagtggctgactgaaaagctgtttggagttatcatttatatcgttttgggttttattgcactcgattatcgtcgtatgcacagtcagcaggcgcgcattattgccttcccgctggcgttggtggtgctgtacatcatcattaaactcgccaccacaaaagtaccgttactggggtaagtcatgagaagcttagctgatttcgaatttaataaagcgccattgtgcgaaggcatgatcctggcttgcgaagcaatccgccgcgattttcccagccaagatgtttacgacgaactggagcgtctcgttagtctggcgaaggaagaaatcagccagcttctgcctttagaagagcagttggaaaaactgatcgcgctgttttacggcgactggggatttaaagccagtcgcggtgtttatcgtctttccgatgcattatggctggaccaggtgttaaagaatcgacagggcagtgcggtaagtttaggtgcggttttattatgggtcgcgaatcgtctcgatttgccgctgctgccggtgattttccctacgcagctgatattgcgcattgaatgtccggatggcgaaatttggctgattaatccttttaacggtgaaagcttaagcgaacatatgctggacgtatggttaaagggaaatatcagcccgagcgcggaactgttttatgaagaccttgatgaagctgataacattgaggtaatccgcaaattgctggatacactcaaagccagcttgatggaagaaaatcagatggagctggcgttacgcaccagcgaagctttattacaattcaaccctgaagatccctatgaaattcgcgatcgcgggttgatttatgcgcaactggattgcgaacacgttgcgttgaacgatttaagttatttcgttgaacagtgtccggaagacccgatcagcgaaatgatccgtgcgcaaataaataacatcgcgcataaacatattgtgctgcattaattaatcgacattttactcaagattaaggcgatcctatgaaacaaaaagtggttagcattggcgacatcaacgtagcaaatgacctgccgttcgtactgtttggcggtatgaacgtgttggaatctcgcgatctggcgatgcgcatttgcgagcactacgtaactgtgacccagaaactgggtatcccttacgtgttcaaagcctcttttgacaaagccaaccgctcctccatccactcttatcgtggaccgggcctggaagaagggatgaaaatcttccaggagttgaagcagacttttggcgtgaaaattatcaccgacgttcacgaaccaagtcaggcacagcccgttgctgatgtcgtggatgtgattcagttgccggcgtttcttgctcgccagactgacctggttgaagccatggcgaaaaccggtgcggtaattaacgtcaagaaaccacagtttgtcagcccgggacagatgggtaatatcgttgataaattcaaagaaggcggcaacgaaaaagtgattctttgcgatcgcggtgctaacttcggctatgacaacctggttgtcgatatgctgggcttcagcattatgaagaaagtgtctggtaacagcccggtgattttcgacgtgacccacgcactgcaatgccgcgatccgtttggcgcagcttccggtggtcgtcgtgctcaggtggctgagctggcacgagccggtatggcggtaggtctggcggggctgtttattgaagcgcatccggatccggaacatgcgaaatgtgatggtccatccgcgctgccgctggctaaactggaaccgttcctcaagcagatgaaagcgattgatgatctggtgaaaggtttcgaagaactggataccagcaagtaatcttttttgcttgaaaaataaagtattagcgttctgcgttaagacttttttcatgggtgccggatacaaaaaaggccgcaggctgttacccctgcggccggtttcgggcgcatattgccatcacggcagcctgacgcccgttttcaccttacttccggttacgccaccagctgacaatcgctgcggtaataattcccgccaggatcggtgctgccaggtcgtgccagaaaatcatggcaaactgcgcgagcgtcatatagccgccttgttgtaatgacaacattttgcggctattcttgaattgttctggttcaagattagcccccgttctgttgtcaggttgtacctctcaacgtgcgggggttttctctttccagcaaccaatgccaccagggataaagcccccgcaacattgcgcctcaccggataacgccggcttggtgtggatactacgactcaattcatcttcacttcatccctgaaatgtttgcaatgaagagtgcattccggtttttcaacagctgttacagtcatttcatgagtgctctggatgaggcttccagctcgggttgccaatatttacttgtggaagtgataaagacaaaaatggccgcaggctgttacccctgcggccggtttcgggcgcatattgccatcacggcagcctgacgcccgttttcaccttacttccggttacgccaccagccgacaatcgctgcggtaataattcccgccaggatcggtgccgccaggtcgtgccagaaagtcatggcaaactgcgcgagcgtcatatagccgccttgttgtaatgacaacattttgcggctattcttgaagtgtctggtttcaagattagcccccgttctgttgtcaggttttacctctcaacgtgcgggggttttctctttccagcaaccaatgccaccagggataaagcccccgcaacattgcgcctcaccggataattccggcttggtgtggatactacgtctcaattcatcttcacttcatccctgaaatgtttgcaataaagagtacattccggcttttcaacagctgttgcagtcgtttcatgagtgctctggatgatgcttccagctcgggttgccaatatttacttgtggaagagataaagacaaaaatggccgcaggctgttacccctgcggccggtttcgggcgcatattgccatcacggcagcctgacgcccgttttcaccttacttccggttacgccaccagctgacaatcgctgcggtaataattcccgccaggatcggtgctgccaggtcgtgccagaaaatcatggcaaactgcgcgagcgtcatatagccgccttgttgtaatgacaacattttgcggctattcttgaagtgtctggtttcaagattagcccccgttttgttgtcaggttttacctctcaacgtgcgggggttttctctttccagcaaccaatgccaccagggataaagccccgcaacattgcgcctcaccggataacgccggcttggtgtggatactacgtcgcaattcatcttcacttcatccctgaaatgtttgcaatgaagagtacattccggcttttcaacagctgttgcagtggtttcgtgcagggtgtggtacaggctcgcaattctgattaacgacctgtccaggtagtatgaagaaatacaataagcaggaatttatattatctcccccgattaccgtcatcggaggagatataactgtcaggcaaatatcgtcatcaaataggcggcaaacagtgccagatgcgctgcgccattgagcatgttagtacgtccggtggagaaggagatatggcacagcactaaagaggccaccatcaccaccatttctggcgcaccaagtgcaaactgcaattcgttacccgtcataaaggcaattagcgtgacgacaggtacggtaaggctaatggttgctaacacactaccaaagaacagattcatcgcgcgctgaacctggttgttcaacactgcttttaatgcacctaaaccttccgggctcagaatcaacagtgccaccaggaagccagtaaaggcgacaggggcattcatgctgtcgagcaatgtctccaggctgctggcgttcattttggtcaccgcaataacggcaatcagatggataatcaaccagatagcatgccacaggctgctatgggcagacggtttaccgtgatgcgggtcgtcatcatcactgtcatcttcgtgctcgtagacaaacaaactttgatgcgttttggtctggatcagcaaaaatacgccatacattgccgcagaaattaatgctaccagtaacgcctgaccggtactaaaattcgccgcaggcagagccattggaaataccagtacgattatcgccagggggaacagcgcaattaaatactgcttgataccaaacagattcatatattgggtggcaaacttacgaccgcccaacaataaactaaagccaaccagcccaccggtaacaatcataatgatactatagagcgtatcacgcattagcgttggcgcggcgtcgccggttgccattaaagcactaatcaaactgacttcaagaataaccacactaaggctaagaataaggctaccgtaaggttctcccaggcgatgggctaatacgtccgcatgacggacaacactaaaggcgctacttaaaataccaataagcgcaagaagattgatggcaatgaccactggtagtgtctggctgcttccccacaggaacagcactaccagcgccagaaccgggaaaataaggctagtctccttgtggcgggtttttaccgcctcttgagcattactcattatggttatccctttgcagatgaatttatcgaaaatgtaaaaaataggtaggaaaaataacagaaagtgtctggatatcggtaacattttacgaatttttaccccgctgtcgattttttactcattggggcataaaaataagtattacgtttagacaatgtttgttttagcgtctcttaagaagagtctgacctgaaaattcttatgttttggcaagagtagatattgttgaccacacttaatgttcaactttgtaaaaggagtcaacgatgccgtataaaacgaaaagcgatctgccggaaagcgtaaagcacgttctaccgtctcatgcccaggatatctataaagaagcgttcaacagcgcatgggatcaatataaagataaagaagatcggcgtgatgacgccagtcgcgaagaaaccgcgcataaagtggcctgggctgctgtgaagcatgaatatgccaaaggggatgatgataaatggcataaaaaaagctaaaaccggtcgcttagttaaagctattcgtgcggtgttgccttgcaagtggtccgtggattgcatattgtcccgttagtggtttcaaaatgagcagtaaaaatgtccggaagacaccaaaaagttgtcgcagggaagtatgcagtggcggaagtgtaaggtgataacgcgtgatttcttgatgaatgccgattgtaaaacggcatttggtgccattgaagaaagtctcttatggagtgcagaacaacgggcggctagcctggcggcgacgctggcttgtcgacctgatgagggaccggtgtggatcttcggctatggaagcttgatgtggaatccggcactggagtttaccgaaagctgcaccggtacactggttggatggcatcgcgcattttgcctgcgcctgaccgccgggcgcgggactgcgcaccagccgggacggatgcttgcactgaaagagggcggacgcaccacaggcgtcgcctatcgactgccagaagagacgctggagcaggaactaaccctgttgtggaagcgagagatgattaccggctgttatctgccaacctggtgtcagcttgatcttgatgatggacgcacagtaaacgccattgtgtttattatggacccgcgacatccagaatatgaatctgatactcgcgctcaggtcatcgcgccgttgattgcggcggcgagcggtccgctgggaaccaacgcacaatacctgtttagtctggaacaggagcttatcaaactgggaatgcaggacgatgggctgaatgatttgctggtaagcgtaaaaaaactgctggcggagaattttccggatggtgtgttacgtccgggattcgcctgagtaaacttcccgcatagtggggcgtcagacgccccctcaaacattaaaatgtgagcactttatcggcactcagcgtccattgcgccagttccacaagagtaccgatttccaccccatcaatcagaggaagtgtactaatcccgcgcccgtcggtacaggttttgcacaatttcaccggtacattctgagcggtaaggatctccagcatttgctgaatgttgtagccttcccctggtttttgcccgcgcaacccggctgtgaccgcatcagacatgaggaacagacgcagatccagattgctctcctgctctcgtaacgcaatggccagccgcaagctgttaaacaaggattcgctcccgtaaggtgcgccattggcaacgatcacgattttttgcattatttactcctgtattcagggaattagacactcatcttctatcttactgcttctgcagcgtctgaccaatcggtcacatttttaaggattttcctgaaagcgcgagaaaatacgacaaaagttgccagtaatcgttattctttaaggctatggtttttcattattaccggaagttaccgacgttttgagccgtttcgttcctcgcattatcccgttttatttactcttgcttgtagcaggcggtacagctaacgcacaatctaccttcgagcaaaaagcggcaaatccctttgataataacaatgatggtctgccggatttaggcatggctcccgaaaatcatgatggggaaaaacactttgctgaaattgtgaaagatttcggcgaaaccagtatgaatgataacgggctggatactggcgagcaggcaaaagctttcgcattgggaaaagtccgcgacgcgcttagtcaacaggttaatcagcacgtagagtcctggctaagtccgtggggaaatgccagtgttgacgtcaaagtggataacgaaggacatttcaccggcagtcgtggaagctggtttgtgccgttacaagataatgatcgttatctcacctggagccagcttggtcttactcagcaggataatgggttggtgagcaatgtgggcgttgggcaacgctgggcgcgcggcaactggctggtgggttataacactttttatgacaacttgctggacgaaaatcttcagcgagcgggctttggtgccgaagcgtggggcgaatatttgcgattaagcacaaacttttatcagccgtttgctgcatggcatgaacagacagccacgcaggaacaacggatggcgcgcgggtacgacctgacagctcggatgcgcatgccgttctatcaacacctcaataccagtgtcagcctagaacagtattttggtgatcgtgttgatttgtttaactctggtacgggttatcacaatcccgtcgcgttgagtctgggattaaattacacccctgtgccattagtcactgtgacggcccagcataaacagggtgaaagtggcgaaaatcaaaataacctcgggctgaatcttaattaccgctttggtgtaccgctcaaaaaacaactttctgcgggcgaggttgccgaaagtcagagcttacgtggtagtcgctatgacaatccgcagcgaaataatctaccgactcttgagtaccgacagcgaaaaacgttaacggtgtttctggcgacaccgccgtgggatctaaaacctggcgaaacagtgccgctgaaattacaaatccgcagtcgttacggtattcggcaactgatttggcagggcgatacgcagatattaagtttgacgccgggcgcacaagccaacagcgcggagggctggacgctgatcatgcctgactggcagaacggggaaggggcaagcaatcactggcgattgtctgtggtggtggaagataaccaggggcagcgtgtctcctccaatgagatcacgctaacgcttgtcgaaccgttcgatgcattgagtaacgacgaactgcgctgggaaccgtaatcagaaaatgcgctcctgatgcacccataccgctgcttccacgcgagacttgagcttcattttcttcagcatgtgcttgacgtgcacttttactgtgctttcggtgatatccaggcggcgggcaatcatcttgttcggcaaaccctgggcaatcagcttgagaatatcgcgctcgcgtggggttaactggttaacatcgcgctcagtagtggcacggttagcgcgcaagctggcggccagaacaggcgttaatgcttcgcttaataccatttcgccagcagctgcctgatgcaatgctttcagcagatcttccggttccatatcttttaacagatagccatccgcgccgcgtttcagtgcggtgaccacatcttcttcatggttagagacgctgaataccacaatgcgcccactgagggacttttcgcgcagtttatccagcgtttccagaccgttcatgccgggcatattgagatctaacaggatcagatcgggatcaagagactccgccagttcaataccctgttcgccattactcgcttcgccaaccacggtgatatctggtgccatactgataagctgttttacgccagttcgcagcatcgggtgatcgtcaatcagcaggatagtagccggttcctgattactcatgggtatctccttggacgtctgtgaaagttttttcgggaataaaggtgaccaccacttcggtgccaccactttcacgacggcggacgcggcaatcgcctcgtaaactttgcgcacgatcgcgcattattatcatgccgtagtgattgctgcggatggcattttcaggcacgccgcagccgttatcctggacggtcagtttgacctgattatcgttttgcgccaccgtcaccacgacttcactcgcttggctatgtttgagggcgttacttaatgcctcacgggcaatttgcaacaagtggattgcctgatggctaggcaccaggcgaggcggcaattgataatccagcttcaccgggaagccaaatttggcgctgtactcttcgcaactcgcctccagcgccggacgtaatccaggctcggtgagctgcaagcggaatgtggtgagcaattcacgcaactgcgcccaggatgcattcagttcgttacggatctgacttaacagttcgcggctgctttctggcagcgcatcgccctgcatctgtaaacaactcacctgcatcttcatgcaagagagagattgggcaatagaatcatgcagttcgcgcgcaatggtggcacgctcttccatcacgatcaactgttgctgacgttcctgatggcgatccagcgccagcgtggcggtgagttgttcaaccagggtatccaccagttgttgttgatcatggctaagatgacgcccctgcggcagggtcgccagcaaaataccgtactgcgtatgagagtcagccagccgccacttcagggtcgtgccgcgatcaccaacgggtaatacgccgcgcgggcagagctggcagcctttatcatcacaagtcatatctggctggcaggtaaactcctgatgattctcttcatcatcagtgtcatacacccgcaattcgatatcacgtagcagggttaaattctgtaagccgttgagtacaggactcaggcgttcacacagcggggcgcgggaatgcaaacggcggttagcctgccataaaaaagagaggatctgatttttatgctccagcccggcggttttctcctgaacccgctgctcaagtacggcataactttcggccagttctgcagacatattgttcaacgcagttccaagcatcgccatttcgttgcgcccgctgatgtttgcgcgttgggtaaaatcgcgatgactgacggcactcgccattgccagcagttgccgccacggttgtagcagtcgcgcccgcaaccagataatagtgaacaccagtaaaagtgccataaataccgccattacccgatggaccagtaccactgtctcgatgcgcatttccgtggtgcggtcaaaaccagataccagttgatcaagcccggcaacaaactggctgacatccgcactcaccgtttctcggttttgtgcacgcatcagcgcagggatcagttcattacgccagtaatcttgtaaaccctgtaattgcgccagttgtccgtctcgttctgctgctcgagtcaactcggcgctaaatgccgtttgttccatctctttaattaagggcttgtctttctcgcttaatggcactgccgccaacagacggtaactttgcatgcgcaggcttcccgctttgttgatcgcatgggcgctgccctgaacgccttgcaccagccagccagaaaccgccatccctgccagtccaatagcagtagaaagcaacacaataagcgcaacctgattaaccagggtgagcggagagagacaacgtttaagcatgtaaacctcttccttcaggctttaaatgagcaataaccttaatgaatgtgacgatacattctggaatggcagtattctcggctattggctgaagtatacccatacccggaaagagttactccttatttgccgtgtggttagtcgctttacatcggtaagggtagggattttacagcaccgtgaaaaatctcataatttttatgaagtcactgtactcactatgggtaatgataaatatcaatgatagataaagttatcttatcgtttgatttacatcaaattgcctttagctacagacactaaggtggcagacatcgaaacgagtatcagaggtgtctatgagtcacagttccgcccccgaaagggctactggagctgtcattacagattggcgaccggaagatcctgcgttctggcaacaacgcggtcaacgtattgccagccgcaacctgtggatttccgttccctgtctgctgctggcgttttgcgtatggatgttgttcagcgctgttgcggtgaacctaccgaaagtcggctttaattttacgaccgatcagctatttatgttgactgcgctgcctagcgtttctggcgcgttattacgtgttccatactcctttatggttcctatcttcggtggtcgtcgctggacggcgttcagcaccggtattctgattattccttgcgtctggctgggttttgccgtgcaggatacctccacgccttatagcgtcttcatcatcatctctctgctatgcggctttgctggcgcgaacttcgcatccagtatggcaaacatcagcttcttctttccgaaacagaagcagggtggcgcgctgggtctgaatggtggtctgggaaacatgggcgtcagcgtcatgcagttggttgctccgctggtggtaagtctgagcattttcgcagtatttggtagccagggcgtcaaacagccggatgggactgagctgtatctggcgaatgcgtcctggatatgggtgccgttccttgccatcttcaccattgcggcgtggtttggcatgaacgatcttgctaccagcaaagcctccatcaaggagcagttgccggtactcaaacggggtcatctgtggattatgagcctgctgtatctggcaaccttcggctccttcatcggcttctccgcgggctttgcaatgctgagtaaaacgcagttcccggatgttcagattctgcaatacgctttcttcgggccgtttattggtgcgctggcgcgttctgcaggtggtgcattatctgaccgtctgggcggaactcgtgtcacgctggtgaactttattctgatggcgattttcagcggcctgctgttcctgaccttaccgactgacgggcagggcggaagcttcatggcgttcttcgcggtcttcctggcgctgttcctgacagctgggctgggtagtggttccactttccagatgattagtgtgatcttccgtaaactgacaatggatcgcgtgaaagcagaagggggttctgacgaacgtgcgatgcgtgaagcggcaaccgacacggcggcggcgctgggtttcatctctgcgattggcgcgattggtggcttctttatcccgaaagcgtttggtagcagcctggcattaacgggtagcccagtcggcgcaatgaaggtatttttgattttctatatcgcctgcgtagtgattacctgggcggtatatggtcggcattctaaaaaataaaccgttactcgtcatacttcgggttacatgtgctgcggctgcgttcattcaccccagtcacttactttagtaagctcctgggattcattcacttgccgccttcctgtaaaccgaattatatagagtaaaatatttgattatcctttgcgcggcatgatgtcgcgctttttttatgcgtcatttagttacaacatactaatgttatatggtttatttcgccggatttcattaagagccattaatatgttacccatggggaatactccttaatacccatctgcataaaaatcttaatagtttaaataactacaggtataaaacgtcttaatttacagtctgttatgtggtggctgttaattatcctaaaggggtatcttaggaatttactttatttttcatccccatcactcttgatcgttatcaattcccacgctgtttcagagcgttaccttgcccttaaacattagcaatgtcgatttatcagagggccgacaggctcccacaggagaaaaccgatgagtaaattcctggaccggtttcgctacttcaaacagaagggtgaaacctttgccgatgggcatggccagcttctcaataccaaccgtgactgggaggatggatatcgccagcgttggcagcatgacaaaatcgtccgctctacccacggggtaaactgcaccggctcctgcagctggaaaatctacgtcaaaaacggtctggtcacctgggaaacccagcagactgactatccgcgtacccgtccggatctgccaaaccatgaacctcgcggctgcccgcgcggtgccagctactcctggtatctttacagtgccaaccgcctgaaatacccgatgatgcgcaaacgcctgatgaaaatgtggcgtgaagcgaaggcgctgcatagcgatccggttgaggcatgggcttctatcattgaagacgccgataaagcgaaaagctttaagcaggcgcgtggacgcggtggatttgttcgttcttcctggcaggaggtgaacgaactgatcgccgcatctaacgtttacaccatcaaaaactacggcccggaccgtgttgctggtttcagcccaattccggcaatgagcatggtttcttacgcaagcggtgcacgctatctcagcctgattggcggtacttgcttaagcttctacgactggtactgcgacttgcctcctgcgtctccgcaaacctggggcgagcaaactgacgtaccggaatctgctgactggtacaactccagctacatcatcgcctgggggagtaacgtgccgcagacgcgtaccccggatgctcacttctttactgaagtgcgttacaaagggaccaaaactgttgccgtcacaccagactacgctgaaatcgccaaactgtgcgatctgtggctggcaccgaaacagggcaccgatgcggcaatggcgctggcgatgggccacgtaatgctgcgtgaattccacctcgacaacccaagccagtatttcaccgactatgtgcgtcgctacaccgacatgccgatgctggtgatgctggaagaacgcgacggttactacgctgcaggtcgtatgctgcgcgctgctgatctggttgatgcgctgggccaggaaaacaatccggaatggaaaactgtcgcctttaataccaatggcgaaatggttgcgccgaacggttctattggcttccgctggggcgagaagggcaaatggaatcttgagcagcgcgacggcaaaactggcgaagaaaccgagctgcaactgagcctgctgggtagccaggatgagatcgctgaggtaggcttcccgtactttggtggcgacggcacggaacacttcaacaaagtggaactggaaaacgtgctgctgcacaaactgccggtgaaacgcctgcaactggctgatggcagcaccgccctggtgaccaccgtttatgatctgacgctggcaaactacggtctggaacgtggcctgaacgacgttaactgtgcaaccagctatgacgatgtgaaagcttataccccggcctgggccgagcagattaccggcgtttctcgcagccagattattcgcatcgcccgtgaatttgccgataacgctgataaaacgcacggtcgtagcatgattatcgtcggtgcggggctgaaccactggtatcacctcgatatgaactatcgtggtctgatcaacatgctgattttctgcggctgtgtcggtcagagcgggggcggctgggcgcactatgtaggtcaggaaaaactgcgtccgcaaaccggctggcagccgctggcgtttgcccttgactggcagcgtccggcgcgtcacatgaacagcacttcttatttctataaccactccagccagtggcgttatgaaaccgtcacggcggaagagttgctgagtccgatggcggacaaatcccgctataccggacacttgatcgactttaacgtccgtgcggaacgcatgggctggctgccgtctgcaccgcagttaggcactaacccgctgactatcgctggcgaagcggaaaaagccgggatgaatccggtggactatacggtgaaatccctgaaagagggttccatccgttttgcggcagaacaaccagaaaacggtaaaaaccacccgcgcaacctgttcatctggcgttctaacctgctcggttcttccggtaaaggtcatgagtttatgctcaagtacctgctggggacggagcacggtatccagggtaaagatctggggcaacagggcggcgtgaagccggaagaagtggactggcaggacaatggtctggaaggcaagctggatctggtggttacgctggacttccgtctgagcagcacctgtctctattccgacatcattttgccgacggcgacctggtacgaaaaagacgacatgaatactagcgatatgcatccgtttattcacccgctgtctgcggcggtcgatccggcctgggaagcgaaaagcgactgggaaatctacaaagccatcgcgaagaaattctccgaagtgtgcgtcggccatctgggtaaagaaaccgacatcgtcacgctgcctatccagcatgactctgccgctgaactggcgcagccgctggatgtgaaagactggaaaaaaggcgagtgcgacctgatcccaggtaaaaccgcgccacacattatggtcgtagagcgcgattatccggcgacttacgaacgctttacctctatcggcccgctgatggagaaaatcggtaatggcggtaaagggattgcctggaacacccagagcgagatggatctgctgcgtaagctcaactacaccaaagcggaaggtccggcgaaaggccagccgatgctgaacaccgcaattgatgcggcagagatgatcctgacactggcaccggaaaccaacggtcaggtagccgtgaaagcctgggctgccctgagcgaatttaccggtcgtgaccatacgcatctggcgctgaataaagaagacgagaagatccgcttccgcgatattcaggcacagccgcgcaaaattatctccagcccgacctggtctggtctggaagatgaacacgtttcttacaacgccggttacaccaacgttcacgagctgatcccatggcgtacgctctctggtcgtcagcaactgtatcaggatcaccagtggatgcgtgatttcggtgaaagcctgctggtttatcgtccgccgatcgacacccgtagcgtgaaagaagtgataggccagaaatccaacggcaaccaggaaaaagcgctcaacttcctgacgccgcaccagaagtggggtatccactccacctacagcgacaacctgctgatgctgactttaggtcgcggtggtccggtggtctggttgagtgaagccgatgccaaagatctgggtatcgccgataacgactggattgaagtcttcaacagcaacggtgctctgactgcccgtgcggttgtcagccagcgtgttccggcagggatgaccatgatgtaccacgcgcaggaacgtatcgttaacctgcctggtagcgaaattacccaacagcgtggtggtatccataacagcgtcacccgtatcacgccgaaaccgacgcatatgatcggcggctatgcccatctggcatacggctttaactactatggcaccgtaggttctaaccgcgatgagtttgttgtagtgcgtaagatgaagaacattgactggttagatggcgaaggcaatgaccaggtacaggagagcgtaaaatgaaaattcgtagtcaagtcggcatggtgctgaatctcgataagtgcatcggctgccacacctgtagtgttacctgtaaaaacgtctggaccagccgtgaaggcgtggaatatgcgtggttcaacaacgtggaaaccaagccgggccagggcttcccgactgactgggaaaaccaggaaaaatacaaaggcggctggatccgtaaaatcaacggcaaactgcagccgcgcatgggtaaccgtgccatgctgctgggtaaaatcttcgctaacccgcatctgccggggatcgacgattattacgagccgttcgattttgactatcagaacctgcataccgcgccggaaggcagcaaaagccagccgattgcccgtccgcgtagcctgattaccggggaacggatggcgaaaatcgaaaaagggccgaactgggaagatgacctgggcggtgagtttgacaaactggcgaaagacaagaacttcgacaacatccagaaggcgatgtatagccagttcgaaaacaccttcatgatgtatttgccgcgcctgtgcgaacactgcctgaacccggcatgtgtggcgacctgcccgagcggtgcgatttacaagcgtgaagaagatggcatcgtcctgatcgaccaggataaatgccgtggctggcgtatgtgcatcactggatgcccgtacaaaaaaatctacttcaactggaagagcggtaagtctgagaagtgcatcttctgctatccgcgtattgaagcgggtcagccgaccgtgtgcagtgaaacctgtgtcggtcgtatccgttatcttggcgtgctgttgtacgatgccgacgctattgaacgtgcagccagcaccgagaacgagaaagatctttaccagcgtcagctggacgtgttcctcgatccgaacgatccgaaagtcatcgagcaggcgattaaagacggtattccgctgagcgttattgaagccgcacagcagagcccggtttataaaatggcaatggaatggaaactggcgctgccgctgcatccggaatatcgcacactgccgatggtctggtacgtgccgcctctgtctccgattcagtctgcagcagacgcgggtgagctgggtagcaacggcattctgccagacgtcgaaagcctgcgtattccggtacagtatctggcgaatctgctgaccgccggtgataccaaaccggtactgcgcgcactgaaacgtatgctggcgatgcgtcattacaaacgtgctgaaaccgttgacggtaaagttgatacccgtgcgctggaagaggtcggtctgaccgaagcccaggcacaggagatgtaccgttatctggcgattgctaactacgaagatcgctttgtggtgccgagtagtcatcgtgaactggcacgggaagccttcccggagaaaaatggctgcggctttacctttggtgatggctgccacggtagtgataccaaattcaatctgttcaacagccgtcgtatcgatgccatcgatgtgaccagcaaaacggagccgcatccatgatcgaactcgtgattgtaagccgtctccttgaatatccggatgctgccttatggcagcatcaacaagagatgtttgaggcgattgccgcgagcaaaaatctgccaaaagaggatgcccatgcgctgggcattttcctgcgcgatttaacgacgatggatccgctcgatgcccaggcgcagtacagcgaactgttcgaccgtggccgcgccacgagtctgttgctgtttgaacatgtgcacggcgaatcccgcgaccgcggccaggcgatggtggacctgctggcgcagtacgagcagcacggcttgcagttaaacagccgcgaattgccggaccatctgccgctgtatctggagtacctggcgcagctgccgcaaagcgaagccgtggaaggtttgaaagatatcgcgccgattctggcattgctgagcgcgcgtctgcaacagcgtgaaagccgttatgccgtgctgtttgatctgctgctgaaactggcgaataccgctatcgacagcgacaaagtggcggaaaaaattgccgacgaagcgcgcgatgatacgccgcaggcgctggatgctgtctgggaagaagagcaggttaaattctttgctgacaaaggctgcggtgatagtgcaatcactgcgcatcagcgtcgctttgccggtgccgtcgcgccgcaatatctgaatatcaccaccggaggacagcactaatgcaattcctgaatatgttcttctttgatatctacccgtacatagccggggcggtcttcctgattggtagctggctgcgttatgactacgggcagtacacctggcgcgcggcgtccagccagatgctggatcgcaaagggatgaacctggcgagcaacctgttccatatcgggattctggggatttttgtcggtcacttcttcggtatgctgacgccgcactggatgtatgaagcctggctgccgattgaagtgaaacagaaaatggcaatgtttgctggtggtgccagcggcgtgctgtgtctgattggcggcgtgctgttgctgaaacgtcgtctgttcagcccacgcgtgcgtgcaaccactaccggagcggatatcctgatcctgagcctgctcgttatccagtgcgcgctgggcctgttgaccattccgttctccgctcagcatatggacggtagcgagatgatgaaactggttggctgggcgcagagcgtggtgaccttccacggtggcgcttctcaacacctcgatggtgtggcgtttatcttccgtctgcacctggtgctggggatgacgttattcctgctgttcccgttcagccgtctgatacacatctggagcgtaccggtggagtatctgacacgtaagtaccagctggtgcgcgctcgtcactaagcgaattttagttcacatagaccctgcttcggcggggtttttttatgggcacggtgcggggtgagttgtcggatgcgcttcgcttatccgacctacaggggaggatattgtaggcccggtaaacgtggtgccatcgggcaaaattagctcggagtaacaggttttgattatttaaggaagcgatggtggtgggggaaggattactcagcgctgcgcgcttcgcccttcgggtcgttgcctgcggcaacgctctcagcctggcgctcaagagcaaccttggtcgaagcttcagttccttccccgcttgggcagaatatttgattgcggatagctttgagaattccggggcttttgaaagtgatggtggtgggggaaggattactcagcgctgcgcgcttcgccctagcggtcgttgcctgcggcaacgctctctcgctgacgctcgagccgaaccttaatcgaagcttctcatccttccccgcatgggcagaatatttgattgcggattcgcttgagagttcagggacttttgaaagtgatggtggtgggggaaggattactcagcgctgcgcgcttcgcccttcgggtcgttgcctgcggcaacgctctctcgctggcgctcgagtgctaccttggtcgaagcttctcatccttccccgcatgggcagaatatttaattgcggattcgttgggaagttcagggacttttgaaagtgatggtggtgggggaaggattcgaaccttcgaagtcgatgacggcagatttacagtctgctccctttggccgctcgggaaccccaccaggggtaattcaaattttgaggtaatgcttgagatggtggtgggggaaggattattcgtcgcttcgctcctcacccttcgggccgttgcctgtggcaacgttctctcgctttcgctcgaatcgaaccttagtcgaaggttctcacccttccccgatgagtgcaaactttcacaatctcaccgaagttaccacatcgctgtggtgaattatggtggtgggggaaggattcgaaccttcgaagtcgatgacggcagatttacagtctgctccctttggccgctcgggaaccccaccacggggtaatgctttttactggcctgctcccttatcgggaagcggggcgcatcatatcaaatgacgcgccgctgtaaagtgttacgttgagaaaaatgaactggttgcgtaattttcatccgtaacggattaaaggtaaccagttatttttgctggcgattaaagaataatcgttcgattaccgtaaacaaagacgcgctgtgccagtactttgtatagtgcacgacttaagacgtttttctcgacgtcacgacctgcgcgcatcatatcttcagctgtgtaggtatgatcgacatgaataacgtcctgcatgatgattgggccttcgtccagattgtcattcacatagtgagcggttgcgccaataatcttcacaccacgttcataggcctggtgataaggacgtgcgccaataaacgctggcaggaaactatggtgaatattgatgatcttattcgggaagcgtgccacaaattccggcgttaatacccgcatatacttcgccagcaccacgtagtcaggttgataagcatcaatggcatccgccatcttttgatcgtgctcgttgcgggttaacccttcatggcttaccagctcaaacggaatatcaaaacgctcaaccagagaacgtaaagtatcgtggttaccaataactgccgcgatttcgacatccaggccgccgtaattggctttcatcaacaaatcgccaaggcaatgcgcttctttagtgaccagaatcactatccggcgacgaccggcaggattcagctcacgcacggagccttctggcaatgcgctatcgagatccgccagcagggtggaatcattaaaaatcccttccagttccgtgcgcataaaaaagcgcccggtacggtgatcaacaaattcattgttctgtacgatatttaactcgtgcttgtagcaaatattggtaatacgtgcgatcagacctttttggtccggacaaatagtacgcagaactttacgttggagactatgcattgctggaaaaaccttgttgagagtgtttgctaaaccgtaccgtcaaccattattggccgcagcactttttaaattttttaccactaccacaagggcagggatcgttgcgaccaaactgcggacgtgtaccgtcaatatagtaccattgaccgttttctttcaaaaatcggctacgttcaattattgcacctgttttaccaccttcggtaaatcgagcaacaaaactgacaaatccgatattgtcggcgtcctgccaacaatgttcaaatacggtcaatcccaaccattcagtatgcgcaaatccggccatcaattcggcacgtaacgccgctgctccacaagagggatgccaggtctttattaaataatctgcgtcttgcatcacaaaagcgcagtaacggctacgcatgagatgttctggatcaggtgcaaccttttcaccagacacataagggtggcaacataggctatactcgacagcactaccacagggacaaagctgagacacaaataatctccctggaaacaataacggcgtattaaccgcctgagtagcactatgttaaccgagcagtagcgatgtggctacgattgcattccaggggaatcttgcgggaataatgagaaagataaaaatagggctggcgctgggatctggcgcggcgagaggttggagccatattggcgttattaatgcgctaaaaaaagtgggtattgaaattgatatcgttgcaggatgtagtattggtagcctggtgggcgctgcctatgcatgcgatcgattatctgcgctggaagattgggtgacctctttcagttattgggatgttttacgcctgatggatctctcctggcagcgcggtgggttactgcgcggcgagcgtgtcttcaatcaataccgcgaaataatgccggaaacagagatcgaaaattgttcccgtcgctttgcggctgttgccaccaatttaagtacgggacgtgaattatggtttactgaaggcgatctccatcttgctattcgcgcaagttgcagtattccaggactcatggcacctgttgcacataacggctactggctggttgatggagcagtcgttaacccaattcctatttccctcacgcgtgcattgggggctgatattgtgatagcggttgacctgcagcacgatgctcatttgatgcaacaagatttgctctcctttaatgtcagtgaagaaaatagcgagaatggtgattctctgccgtggcatgcgcgtctgaaagaaaggttaggcagcataacgacacgtcgggcggtgacagcgccaacggcaacagagattatgaccacttctatccaggtgctggagaaccgccttaaaaggaaccgcatggcaggtgatccgcccgatattctgattcaacctgtttgcccgcaaatatctacgcttgatttccatcgcgcgcacgctgccattgcggccggacagctggcagtggaaaggaaaatggacgaacttttgccgttggtacgcaccaacatttgaccagaatttttatctacacttaagttaattctgacaggcgcaggtggcaatagcatgccactattgagtaaagccagtcaggggagagaacatgacgcagccattggtcggaaaacagattctcattgttgaagatgagcaggtatttcgcagccttctggatagttggttttccagtttgggagcgacaacggtactggcggctgatggggtggatgcccttgagttgctgggaggtttcactccagacctgatgatatgtgatatcgcgatgccacgaatgaacgggcttaaactgctggagcatatacgtaacagaggcgaccagaccccagttctggtgatatctgccactgaaaatatggcagatattgccaaagcgttacgtctgggcgttgaagatgttttgctgaaaccagttaaagatctgaatcgcttgcgcgagatggtttttgcctgtctctatcccagcatgtttaatagccgcgttgaggaagaggaaaggctttttcgcgactgggatgcaatggttgataaccctgccgcagcggcgaaattattacaggaactacaaccgccggttcagcaggtgatttcccattgccgggttaattatcgtcaattggttgccgcggacaaacccggcctggtgcttgatattgccgcacttagcgaaaacgatctggcattttattgccttgatgtcacccgagctggacataatggcgtacttgctgccttgttattacgcgcattgtttaacggattattacaggaacagcttgcacaccaaaatcaacggttgccagagttgggcgcgttattgaagcaggtaaaccatttacttcgtcaggccaatctgccggggcagtttccgctattagttggctattatcatcgcgaactgaaaaatctcattctggtttctgcgggtctgaatgcgacgttaaataccggcgaacaccaggtgcaaatcagtaatggtgttccgttaggcactttaggtaacgcttatttgaatcaattgagccagcgatgcgatgcctggcaatgccaaatatggggaaccggtggtcgactgcgcttgatgttgtctgcagaatgagcaaacgataacgcgggctaaatttgcattacctgctaatgtcggctggtggtactatcgtcgccattcgtataagtaattgtcttaattatgctaactcgcctccttttcagaacttagccccttcggggtgctgatatactgggatgcgatacagaaatatgaacacgttcaaaacacgaacagtccaggagaatttaaatggctgccattaatacgaaagtcaaaaaagccgttatccccgttgcgggattaggaaccaggatgttgccggcgacgaaagccatcccgaaagagatgctgccacttgtcgataagccattaattcaatacgtcgtgaatgaatgtattgcggctggcattactgaaattgtgctggttacacacagttctaaaaactctattgaaaaccactttgataccagttttgaactggaagcaatgctggaaaaacgtgtaaaacgtcaactgcttgatgaagtgcagtctatttgtccaccgcacgtgactattatgcaagttcgtcagggtctggcgaaaggcctgggacacgcggtattgtgtgctcacccggtagtgggtgatgaaccggtagctgttattttgcctgatgttattctggatgaatatgaatccgatttgagtcaggataacctggcagagatgatccgccgctttgatgaaacgggtcatagccagatcatggttgaaccggttgctgatgtgaccgcatatggcgttgtggattgcaaaggcgttgaattagcgccgggtgaaagcgtaccgatggttggtgtggtagaaaaaccgaaagcggatgttgcgccgtctaatctcgctattgtgggtcgttacgtacttagcgcggatatttggccgttgctggcaaaaacccctccgggagctggtgatgaaattcagctcaccgacgcaattgatatgctgatcgaaaaagaaacggtggaagcctatcatatgaaagggaagagccatgactgcggtaataaattaggttacatgcaggccttcgttgaatacggtattcgtcataacacccttggcacggaatttaaagcctggcttgaagaagagatgggcattaagaagtaacatccgtatcggtgttatccacgaaacggcgttgagcaatcgacgccgtttttttatagcttattcttattaaattgtcttaaaccggacaataaaaaatcccgccgctggcgggattttaagcaagtgcaatctacaaaagattattgcttgatcaggaaatcgtcgagggatttaccttgctcatccattgcttttttgattacagctggagtacggccttggccagtccaggttttagtttcgccgttttcgtcaacgtagctatattttgccggacgctgagcacgtttagctttggtgccagatttaacggcagcaaggctattcagcagttcgttcgggtcaataccgtcagcgatcagcatttcgcgatattgctgcagtttacgagtgcgctcttcaacttcagcagcagccgcgctttcttcttcgcgacgttcgttaacaacaacttctaatttttccagcatttcttccagcgtttcaagtgtacattctcttgcctgcgcacgaagagtacggatgttgttcagaattttaagtgcttcgctcattgtagtaatctcaaacttatattggggtggtttgttgaggtaataatagagccttaaattcagttgtgcaatagccaggaatgtaaggaattcaaaattgttctttattttgtgccgccaataaatatcttttcataaaattagccagaaaagacgcggcatatagccctatttacaccgatgatttcgcagcacgtgaggttaaaacttcctgattcatgtcacattttatggggagattatcgtaggctgacgacctttcagtcttctgtattagttgtgtttacgagaattccctattaagcgaatgatgaaaagtagaacagtcgcaataagagcatggacttagtattgcactatctcctggaggtcaacagagggctattacttgcgcaacaggttaaagattgtgaatagttaccagcagtcatttacccgcttataacaagcgaggcagttgtaatgatagctcagaaggattatgcaaggcttcgtaagggagaacgcatatacccacttctgtgcatactgttgagctgaaaaactgacgaattatgataaactccagccaactttatttcatatcattgagggcctgtggctgatggcacagctatatttctactattccgcaatgaatgcgggtaagtctacagcattgttgcaatctagttacaattaccaggaacgcggcatgcgcactgtcgtatatacggcagaaattgatgatcgctttggtgccgggaaagtcagtagccgtataggtttgagtagccctgcaaaattatttaaccaaaatagtagtttatttgatgagattcgtgcggaacatgaacagcaggcaattcattgcgtactggttgatgaatgccagtttttaaccagacaacaagtatatgaattaagcgaggttgtcgatcaactcgatatacccgtactttgttatggtttacgtaccgattttcgaggtgaattatttattggcagccaatacttactggcatggtccgacaaactggttgaattaaaaaccatctgtttttgtggccgtaaagcaagcatggtgctgcgtcttgatcaagcaggcagaccttataacgaaggtgagcaggtggtaattggtggtaatgaacgatacgtttctgtatgccgtaaacactataaagaggcgttacaagtcgacagtttaacggctattcaggaaaggcatcgccacgattaataagaatttctttactgacagggtgagcagggcacttttatcctgtcagttcgttttacgcacttcttccgggctatatacccttctcggcagttttttaacgccgctatacgcctcacagggctcttaagcaccgacgttgacttgtgacctgtaaagtacaatatccctgtgtttaggcgttatacatcgtcgcaaatatgatgaaggctaatgctgtcggtttatggaaaagttgctttgggtaaacaaaaaatacggccccagaagggcaatgccgttcacttaagaggagcggcactatgtttcacaggataacgggtttttgatatcttaaccgacctcggccttgatggtcgggggcgttttgttatgaacaccacttccagagcaccccgaagatgctccagtcgtttcgggatggtccctggtgacgccgtgtttcccagctctatcatttctgatgcgatattcttccacgcaggcagtagccagtggcggttacaacccttctggttcagcgtcagcagcaggtcttcgctgtaaaaaagtttatcaaacaacgtaatagagttatccgggatggtggcgagcatggagtgggccagcacagtttcgctctgccggtaaggtgcggtcacggcattcagcagaatgtgacttcccaggttcattaaggccaccagacgcataaccgggtaggcgttctgccgcttagtggatgtgttggcagacccataatattcacgcagctcgggtttatcaggtgtcctgaactgtgcgccatcaatggcaaaaagttgcaggccgtgccagtcatccttcaggtaacgttccgcgcccctgtctgtgcggtctggcggaagagccattccactggggcggcccccacgcgctgacgcgcctgggtgacagcgctgcgggccagcaggttcatccccgcttcgccatccgcgctcaggttcagacggcgaacaacatcggtaattggctcattgcaccaccatccagataaccatgtcccccggtaaacgacggcggcgaacggtcgcatgagcagaaagcgtcaggcagtgttgtatccactcggtgggaaggtgttctgcaaatagttgtgcagagggcggaggcataagcggatggtcactgaaatcgagcagatcattgagaagtggcataagaaaacggctccctgttgtggaagccgttatagtgcctcagtttaaggatcggtcaactaatccttaactgatcggcattgcccagaaggggccgtttatgttgccagacagcgctactgattaagcggattttttcgcttttttctcagctttagccggagcagcttctttcttcgctgcagtttcaccttctacataatcacgaccgtagtaggtatccagcagaatctgtttcagctcggagatcagcgggtaacgcgggttagcgccggtgcactggtcatcgaatgcatcttcagacagtttatccacgttcgccaggaagtctgcttcctgaacgccagcttcacggatagatttcggaatacccagttcagctttcagcgtttccagccatgccagcagtttctcgatcttagcagcagtacggtcgcccggtgcgctcagacccaagtggtcggcaatttcagcataacgacggcgagcctgcggacggtcatactggctgaatgcagtctgcttggtcgggttgtcgttcgcattgtagcgaataacgttacaaatcagcagggcgtttgccagaccgtgcggaatatggaactgggaacccagtttgtgcgccatactgtgacatacacccaggaaggcgttcgcaaacgcgatacccgcgatagtcgctgcactgtgaacacgttcacgcgctaccggatttttagacccttcgtggtaggacgctggcagatattctttcagcagtttcagtgcctgcagagcctgaccatcagagaactcagatgccagtacagaaacataagcttccatggcgtgagttactgcgtccagaccaccgaaagcacacagggacttcggcatgtccataaccaggttggcgtcgacaatcgccatatccggagtcagcgcatagtctgccagcggatatttctgaccagtagcgtcgtcagttacaaccgcaaacggagtgacttcagaacctgtaccagaagtggtggtgacagcgatcattttcgctttcacgcccattttcgggaacttgtagatacgtttacggatatccataaagcgcagcgccagctcttcgaagtgagtttccggatgttcgtacataacccacatgatcttcgcggcgtccatcggggaaccaccacccagcgcgataatcacgtctggtttgaaggagtttgccagttctgcacctttacgaacgatgctcagggtcgggtccgcttctacttcgaagaagacttcagtttcaacgcctgctgctttcagtacggaagtgatctgatcagcataaccattgttgaacaggaagcggtcagtcacgatgagcgcacgtttgtggccatcagtaatcacttcatccagcgcgattggcagggagccacggcggaagtagatagatttcggaagtttgtgccacaacatgttttcagctcgcttagcaacggttttcttgttgatcaggtgtttcggaccaacgttttcagagatggagttaccaccccaagaaccacaacccagagtcagggaaggtgcgagtttgaagttatacaggtcaccgataccaccctgagacgctggggtgttaatcaggatacgcgccgttttcattttctgaccgaagtaagaaacgcgagccggttggttatcctggtcagtgtacaggcaagaggtatgaccgataccgcccatagcaaccagtttctctgctttttctaccgcgtcttcgaaatctttagcgcggtacattgccagagtcggggacagtttttcatgtgcgaacggttcgctttcatcaacaacggtcacttcaccgatcagaatcttggtgttttctggtacagagaagcctgccagttcagcaattttataggctggctgaccaacgatagccgcgttcagcgcaccgtttttcaggataacatcctgaacagctttcagctctttaccctgcaacagatagccgccgtgggttgcaaaacgttcacgtacagcgtcataaacagagtcaacaacaacaacagactgttcagaagcacagattacgccgttgtcgaaggttttggacatcagtacagatgcaactgcacgtttgatatcagcagtttcatcgataacaactggagtgttgcccgcgcctacaccgatagctggtttaccggagctgtatgcggctttaaccatgcccggaccaccagtcgcgaggatcaggttgatgtctgggtggtgcatcagtgcgttagacagttcaacagaaggttgatcgatccagccgatcagatctttcggagcaccggcagcgatagcagcctgcagaacgatatcagccgctttgttggtggcatcttttgcacgcgggtgcggggagaagataatggcgttacgggtcttcagactgatcaggcttttgaagatagcagtactagtcgggttagtggtcggaacgataccgcaaataataccgattggttcagcgatagtgatggtaccaaaagtgtcgtcttcagacagaacaccacaggttttttcatctttataggcgttgtagatatattcagaagcaaagtggtttttgatcactttatcttcgacgatacccatgccggattcggcaacggccattttcgcgagtgggattcgagcatctgcagcagccagagcggcggcgcggaagattttgtctacttgctcttgagtgaaactggcatattcacgctgggctttttttacacgctctacgagtgcgttaagttcagcgacattagtaacagccataatgctctcctgataatgttaaacttttttagtaaatcatctgctcgaatacgagagtatagtcagtgcggtgatgatttgcttaacctatgaaaatcaaaagcttactcgcgctcacactcactgtgatttactaaaagagtttaaacattagagttattatctctaatgcgtcacttccaggtggcgtaagcaagattactcacttctgggtactgattacgtgatccaaatcaaatttttgcaaagctgacacctttcagcatcgcttttcgccattatagctaacagttaataaattgtagtatgatttggtggctacattagcatgttttgcacaactagataacaataacgaatgatagcaattttaagtagttaggaggtgaaaaatgctgtcaaaaggcgtattgtcagcgcgtcttttcaaccttatttatggctaacattatccggcttttgcttcggagctaaccgtgattcagaccttttttgattttcccgtttacttcaaatttttcatcgggttatttgcgctggtcaacccggtagggattattcccgtctttatcagcatgaccagttatcagacagcggcagcgcgaaacaaaactaaccttacagccaacctgtctgtggccattatcttgtggatcagcctttttctcggcgacacgattctacaactttttggtataagtattgatagcttccgtatcgccgggggtatcctggtggtgacaatagcgatgagcatgatcagcggcaagcttggcgaggataaacagaacaagcaagaaaaaagtgaaaccgcggtacgtgaaagcattggtgtggtgccactggcgttgccgttgatggcggggccaggggcgatcagttctaccatcgtctggggtacgcgttatcacagcattagctatctgtttggtttctttgtggctattgcattgttcgctttatgttgttggggattgttccgcatggcaccgtggctggtacgggttttacgccagaccggcatcaacgtgattacgcgtattatggggctattgctgatggcattggggattgaatttatcgttactggtattaaggggattttccccggcctgcttaattaattcctttcaaatgaaacggagctgccatgctccgtttacttcgtcattatttttactttgttcccgcgcagttatcaaaagcaaaaggaataggtaaaaatattcttctcaaattacagttagttataaggatttccttaactgcttctcctcaccatcatgttattttcgccacatcataatcctgggcttgctgaagaataattgaaatgatattattaattccactgcctttggtagaggaaagtgctaaataataatcaattgttaaattattgtgcatttcactactggaactgtaatcagaaaagatagacatgcttagccaatctctatttgattgaattgaaagatgtttgttaaggcatggatgcaagctatagattctgatacggtcaataaaagagaattgcttaacaattttgcaaaatgtattggcgagtaagaaccgcatttggtactttccgggcaaccgccagacgattctttattggtaatgagaataattaacaattaaagagcgtcgcgaaagaataatgtgtctcgacaggggagacacagtacgaatcgacataaggtgatcgtctgaatcaccagaataaataaagtcggtgatagtaatacgtaacgataaagtaacctgacagcagaaagtctccgagcctgtgcagggtcccaatccgggattacacatgctggttaataccagtaattataatgagggagtccaaaaaacaatgaccaacatcaccaagagaagtttagtagcagctggcgttctggctgcgctaatggcagggaatgtcgcgctggcagctgatgtacccgcaggcgtcacactggcggaaaaacaaacactggtacgtaacaatggtagtgaagttcagagtttagatccgcacaaaattgaaggtgttccggagtctaatatcagccgagacctgtttgaaggcttactggtcagcgatcttgacggtcatccagcacctggcgtcgctgaatcctgggataataaagacgcgaaagtctggaccttccatttgcgtaaagatgcgaaatggtctgatggcacgccagtcacagcacaagactttgtgtatagctggcaacgttctgttgatccgaacactgcttctccgtatgccagttatctgcaatatgggcatatcgccggtattgatgaaattcttgaagggaaaaaaccgattaccgatctcggcgtgaaagctattgatgatcacacattagaagtcaccttaagtgaacccgttccgtacttctataaattacttgttcacccaagtactagtccggtgccaaaagccgctatcgagaaattcggcgaaaaatggacccagcctggtaatatcgtcaccaacggtgcctataccttaaaagattgggtcgtaaacgaacgaatcgttcttgaacgcagcccgacctactggaacaacgcgaaaaccgttattaaccaggtaacctatttgcctattgcttctgaagttaccgatgtcaaccgctaccgtagtggtgaaatcgacatgacgaataacagcatgccgatcgaattgttccagaagctgaaaaaagagatcccggacgaagttcacgttgatccatacctgtgcacttactattacgaaattaacaaccagaaaccgccattcaacgatgtgcgtgtgcgtaccgcactgaaactaggtatggaccgcgatatcattgttaataaagtgaaagcgcagggcaacatgcccgcctatggttacactccaccgtatactgatggcgcaaaattgactcagccagaatggtttggctggagccaggaaaaacgtaacgaagaagcgaaaaaactgctggctgaagcgggttataccgcagacaaaccgttgaccatcaacctgttgtataacacctccgatctgcataaaaagctggcgattgctgcctctagtttgtggaagaaaaacattggtgtaaacgtcaaactggttaaccaggagtggaaaacgttcctcgacacccgtcaccagggtacttttgatgtggcccgtgcaggctggtgtgctgactacaacgaaccaacttccttcctgaacaccatgcttagcaacagcagcatgaataccgcgcattataagagcccggcctttgacagcattatggcggaaacgctgaaagtgactgacgaggcgcagcgcacagctctgtacactaaagcagaacaacagctggataaggatagcgccattgttcctgtttattactacgtgaatgcgcgtctggtgaaaccgtgggttggtggctataccggcaaagatccgctggataatacctatacccggaatatgtacattgtgaagcactaatggcaatacgtggggcaggagtgtcctgctccacggtgtctgatttttatcgcattacagaaggcacaggccagaaggtagggcaatgttaaaatttattctacgtcgctgtctggaagcgattccgacgctatttattcttattactattagcttctttatgatgcgcctcgcgccgggaagcccttttaccggcgaacgtactttaccgccagaagtgatggccaatatcgaagcgaaatatcatcttaatgatccgatcatgacacagtatttcagctacctgaaacaactggcgcacggtgatttcggtccaagctttaaatataaagattatagcgtcaatgacttggttgcatccagttttcccgtttctgccaaactgggagccgcagcatttttccttgcggtaatactgggtgttagtgctggcgttattgccgcattaaaacaaaacaccaaatgggactataccgtgatggggctggcaatgaccggggttgttatccccagttttgtggttgcaccattattagtcatgatatttgcgatcattttgcattggctgccgggcggtggctggaatggtggggcgcttaaattcatgatattgccgatggtggcgttgagtctcgcttatatcgccagtattgcgcgtattacccgtggctctatgattgaagtattacactccaattttattcgtactgcccgggcgaaagggttacctatgcggcggatcattttacgtcacgcattaaaacctgctctgttacccgtgctctcttatatgggccccgcatttgtcggcattattaccggttctatggttatcgaaaccatttatggtttgccggggattggacaactgttcgttaatggcgcattgaaccgtgactattccttagtgttaagcctgaccatcctggttggtgctttaaccattttgtttaatgccattgtcgatgtgctatatgcggttatcgacccgaaaatccgttactgatactggagctcgcgatgatgttaagtaagaaaaacagcgagacgctggaaaatttcagtgaaaagctggaggtcgaagggcgcagcttgtggcaggacgcacgtcgacgttttatgcataaccgtgcggcggttgccagtctgatagtgctggtgctgatcgcgttatttgtaatcctggcaccgatgctttcccagtttgcctatgacgatactgactgggcgatgatgtccagcgccccggatatggagtccggtcactactttggtactgacagttccggtcgcgacctgcttgtgcgcgttgcgattggcgggcgtatcagtctcatggtcggtgttgctgcggcactggtggctgtggtcgtcgggacactttatggtagcctttccggttatctgggcggtaaagtggatagcgtaatgatgcgtctgctggaaatcctcaactccttcccattcatgttcttcgtcattttgctggtgacctttttcggtcaaaacatcctgctgattttcgtggcgataggcatggtttcctggctggatatggctcgtattgtgcgtgggcaaaccctgagtctgaagcgcaaagagtttattgaggcggcacaagttggcggtgtaagcacaagcggcattgttattcgccacattgtgccgaatgtactcggtgtggtggtggtctacgcaagtcttctggtgcccagcatgatcctctttgaatctttccttagcttcctggggttgggtacgcaagagccgttaagcagctggggtgcattgctgagtgatggcgcgaacagcatggaagtctctccatggttattgttgttcccagcgggattcctcgtggtgacgctgttttgtttcaactttatcggcgatggcttgcgtgatgccctcgacccgaaagatcgttaaggagtgcagccatgagcgtaattgaaactgcaactgtgccgctcgcacaacaacaggctgacgcactgctgaacgtgaaagatttgcgtgtcacctttagtaccccggacggcgacgtcacggcggtcaatgatttgaatttttccctacgtgccggagaaacgctgggtattgtaggtgagtctggtagcggtaaaagccaaactgcatttgcgttgatgggcctgttggctgccaacggacgtattggcggaagcgcaaccttcaatgggcgtgaaatcctcaatttgccagagcatgaactcaataaactgcgcgctgaacaaatcagtatgatttttcaggacccaatgactagcttgaatccctatatgcgcgtcggtgagcagttgatggaagtgctgatgctgcataagaacatgagcaaagctgaggcgtttgaagagagcgtgcggatgctcgatgcggtaaaaatgccggaagcgcgtaaacgcatgaaaatgtacccgcacgaattttctggcggcatgcgtcagcgagtcatgattgcgatggccttgttatgtcgacctaagctgctgattgcggatgaaccaacaactgcgctggacgtcaccgtacaggcgcagatcatgacgctattaaatgaactgaagcgggaatttaataccgccatcattatgatcacccacgatcttgtcgtggtggcggggatctgcgacaaagtgctggtaatgtacgccgggcgcacgatggaatatggcaacgcgcgcgatgtcttttatcaacccgttcatccttattctatcggtttgctcaacgcggtgccgcgtctcgatgcggaaggtgaaacaatgttgaccatcccgggtaatccgccaaacctgctgcgattaccgaaaggttgcccgttccagccacgttgtccgcatgcgatggaaatttgtagtagcgcaccgccgctggaagagtttacgcctggccgtctgcgtgcttgctttaaaccggtggaggaactgttatgaatgctgtaactgaaggaagaaaagtcctccttgaaatcgccgatcttaaagtgcactttgaaatcaaagatggcaaacagtggttctggcaaccgccgaaaacgctcaaagccgtcgatggtgtcactcttcgcctgtatgaaggggaaacattaggtgtggtaggggaaagcggatgcggtaagtccacctttgctcgcgccatcatcggtttggtcaaggcgaccgacggtcatgttgcctggttaggtaaagagttgctgggcatgaaacccgatgaatggcgtgccgttcgcagtgatattcagatgattttccaggatccgttggcaagcctaaacccgcgtatgaccatcggcgagatcatcgctgaaccactgcgtacttatcatccgaaaatgagtcgccaggaagttcgcgagcgcgtgaaggcgatgatgctgaaagtcgggttattgcctaacctgattaaccgctatccgcatgagttctctggtgggcagtgccagcgtatcgggattgcgcgtgctcttattcttgaaccgaagctgattatctgtgatgagccggtgagcgcgctggacgtgagtattcaggcacaggtggtcaacctgctccagcaattgcaacgtgagatgggattgagtttaatttttatcgctcatgacctggccgtggtaaaacacatttccgatcgtgtgttggtgatgtatctcggccatgcggtagaactggggacctatgatgaggtctaccacaatccactacatccttacaccagggcattgatgagcgcagtccccatacctgatccggatctggagaagaacaaaaccatccagttactggaaggggaattaccgagcccgatcaacccgccttccggttgtgttttccgtacccgttgcccgattgccggtccagagtgcgccaaaacacgtcctgttctggaggggagtttcagacactccgtttcttgcctgaaagtcgatccgctttaaaaacaataagggctgacagttgtcagccctttttcacgctaaaagcgattatttattcccgccagatgatatggcaaagtttgtgatctttttcgcggcataacagaatgcgggcaaaaacatcgttgatttcaccatcttcactgtccgccagaccaatcaccacttcggcaaaaaagtccgggttcaaatcgaaatcaacatgttcctgccagtcttccgccggatcgaataactccgcgccgccgcgctcttcaaactgaagattgaacagcagaacatcagctggatcgagattgtcggcagccagttcgagaaaaatatcgtaggcctgttcaagcgtttcatcttcagtcaggcgattgtttagatccatatccatagttactacctgtttaacctctgttggcgacgttttacagcaacggactgaagaagtaaaacagtcgctcggcgacacgttgccataatggacgttttagccataaacgggcatcgagcagacgactacggctaatataatcgtcctgaacggcggcgaggtcagcaccaaaacctttatcgtcgattgccagggtaatctcgaaatttagccacagactacgcatatcaaggttaactgtgccaaccagacttagttcgccatcgaccagcacgctcttggtatgcagtaacccgccttcaaactgataaattttaaccccagcagccagcagttccgtaaagaatgcgcgactggcccagccgaccagcatgctgtcattttttcgcggaaggataatactgacatccaccccgcgctgcgccgccgtgcaaatcgcatgaagtaaatcatcgcttggcacaaagtagggcgtggtcatgatcaaatattcacgcgcgctataagccgcagtcaataatgcctggtgaatgagatcttccggaaagccggggccagaagcaattgtgtgaatggtgtgaccgctggcctgttcaaacggcataatattgacatctggtggtggcggcagaatacgttttccggtttcaatctcccagtcgcaggaataaataatccccatcgcggtggcgatagggccttccatacgcgccatcagatcaatccattgccctacgcccgcatcttgtttgaagtagcgaggatcgaccatattcatgctgccggtgtacgcgatgtaattatcgatcatgatcatcttgcgatgttggcgcaggtccatacggcgtaaaaacacacgcatcagattgacctttaaggcttcgaccacttcaataccggcattacgcattagctcgggccacgggctgcggaaaaaagccacactcccggcggagtcgagcatcaatcggcaatgaatgccgcgtcgcgcagccgccattaaactttcagccacctggtccgccatgccgccgggctgccagatataaaacaccatctcaatattatggcgcgcgagctggatgtcgcggattaacgcctgcatcacatcatcactctcggtcatcagttgtagctgattccctttgaccccagcgatcccctgacgacgctcgcaaagcttgaataatggcgcagcgacactgctattttcttcggcgaagatatgcttacaggctttaaggtcgttaagccattttgcggtggaaggccacatcgctctggcgcgctcagcgcggcgtttgcctaaatggagctcgccaacggcaagataggcaataattccgactaacggcagaatgtaaataatcaacagccaggccatcgcggagggaactgcgcgtcgtttcattagaatgcgtaaagttacgcctgcaatgagcaaccagtatcccagaatggccaaccaactcaccaacgtataaacggttgtcatagattagaaatccttttgaaagcgcattgttatgagtttacgcatatggattcatctggcaaataaaaacgcgggaaaagcactggtcagcgtcgggggtgggggtataatgaccattctgttattgcatagagtagttaacatgaagcggagtagaacggaagtggggcgctggcgcatgcagcgtcaggctagccgacgtaaatcgcgttggcttgaggggcaatcgcgccgaaatatgcgtatccacagcatcaggaagtgcattctaaacaaacagcgtaactcgttattgtttgcgatctacaatatctaaatgtactgggcaccattgcggtgcccaataagtttactcttccgtctttaaactttatttttgcgcgctttctttactgtcagctttcgtttctagttcatcgttatcgctgaaaataccatgaccactgttcaacaacatactaacgagcatatcattattaatctcttcaccatttaaaactcgcgccagaatttcgctgccaaacagttgcggactgagaatgatatccggatgtaccatcttaatcttattcaggtttttgctatcactgacggcgagaactgttttgacatcactgctcatatcttttgcgctgagtacaacaaacgcgttatctgcatcgttatcactcagcgccagaatggcccggcaacgatcgattcccgctttctttaatacagaactgtcattactgtcaccggggataacatcagcattatcgcctaagcgttgctcaagttgcttgatatcatcttcaggcaagttgctgataaccgttacgttttgtccgcgttgattcagttgcaggatcgtattgatggcgagaatgctatgtccgcaaacaataaaatgatctttacgatgcattgtatgattgtttccttttacaagtttgttgaatcccccgcggataagcggaccaaaaatactggtcatagatgtggcaaaaacggtaatgccggaaataatgacgctaatagtgaacaatcgtgcactttcagaaacagggacaatatcgccatagccgacggtactcatggtttctatgctaaaatagaacgcggtcatcaaactttctattcgcggattaaaaccttcgcttaaataaagcgcaccgtaggtactgtaaaacagtaatgtcgtgaaactaataaatgcaaaaattgtcccggctgcggcgctactgtgggagaagtctttgcgcagtatcagcaaaaacaccagcgtaaaaatgcaaaatccaatactaaatttcagccagggataaaaatgcagggtgtaaattagcgctatcaacaacaaaatgatactgattgcccatgcgagctttgcccggaacagtaagccaatggagttcaggacaagaaagacgccgagcataaagagtggggcgtttgccagcaaggagagatccaactcactaaatgctttgatatggaaaatatcaagcaaattgacgctcataccatagattgttttaaaaataagcaatccatttaaaaagacggccagcgcgagaatgtcgtgccgaagggtcacccataaatttgttgctgtttgtttgaatgtagcccagtgactcactgatacctctgtaaccacaattttgtttaattatcttagcgtgcacattttctgaacatacatgcagcgcgtgaatgtgttaaacaatagtagatgactttatccgcagtaatcaaaggatttgagcgagcaactgtacctcaggaaaggtcatttttcctgaatatgctcacatcatataaagaaatacagataaagttattatctgcttgtggtggtgaatgcactgaccggctataaggaaaggccaaacaagaacacggttgcaaaaaccgtgcccttaaatattgaatctctattcagaacactttcttaaatggtttcacactaacgtgttcatagactcctgccgctacgtacgggtcagcatcggcccaggcctgagctgcttccaggctttcaaattcagcaataacggtactgccagtaaatcccgcagcccctggatcgttactgtctaccgctggcattggaccagctgtcaacaaacgaccttcatcatgcagtaactgtaaacgtgctaaatgtgccggacgaacggaaaggcgtttttcgaggctatcagctttgtcttgagcgtaaataacatacaacacgggcacaactccttgttcgggaaagttgtaaagtacgttatttgaaagggcgaagatctgcaacggaaagatgatgtctttgttaaggccatgcataaagtaagggtaattacgccaaaaatgacattttcactgatcctgatcgtcttgccttattgaatatgattgctatttgcatttaaaatcgagacctggtttttctactgaaatgattatgacttcaatgacccttgatttacctcgccgcttcccctggccgacgttacttagcgtctgcattcatggtgctgttgtggcgggtctgctctataccagcgtacatcaggttattgaactacctgcgcctgcgcagccgatttctgtcacgatggttacgcctgctgatctcgaaccgccacaagccgttcagccgccaccggagccggtggtagagccagaaccggaacctgagccgatccccgaaccgccaaaagaagcaccggtggtcattgaaaagccgaagccgaaacctaagccaaaaccgaagccggtgaaaaaggtacaggagcagccaaaacgcgatgtcaaacccgtagagagccgtccggcaagtccgtttgaaaatacggcaccggcacgcctgacaagtagtacagcaacggctgcaaccagcaagccggttaccagtgtggctagtggaccacgcgcattaagccgtaatcagccgcagtatccggcacgagcacaggcattgcgcattgaagggcaggttaaagttaaatttgacgttacgccggatggtcgcgtggataacgtacaaatcctcagtgccaagcctgcgaacatgtttgagcgtgaggtgaaaaatgcgatgcgcagatggcgttatgagccgggtaagccaggcagtgggattgtggtgaatatcctgtttaaaattaacggcaccaccgaaattcagtaagcagaaagtcaaaagcctccgaccggaggcttttgactattactcaacaggtaaggcgcgaggttttccttcaggatcaaccgcgacatacttaaataatgcttctgtcgctttatagcgttgcccaattggttcagacgctacttttttcacccacacttcaatattaatgctgacgcttgtcgtccctttctggacacagcgtgcatagcagcacaccacatcgccgaccgcaaccggccgtaagaaagtcattccttcaacccgcacagtcactacgcgaccgtgggcaatttcttttgccagaatagcgccgccaatatccatttgactcattaaccaaccaccaaagatgtcaccattggcattggtatcggcgggcatggctaaagtacgtaaaacaagatcgccctgagggacgttatgtgttgtagacatggtaaaaccgacttaaaaggaaaatcacaggcgcgatgctactatgattttcctgaggagaacagaggagatacagcgccagccccgaaggactggcagtctggttaggatttatcttcctgcggcatgtggcggtagatatagataccgcttaacaatgtgaagattaaggtaagggcggtcaggccaaagactttaaagttgacccaaatattttgcggcagccagaatgcgatgtagatgtttgccagaccgcaaaggataaagaaaacagcccaggccagattcagcttgctccataccggttgcggcagcgtgagttctttacccagcatccgctgaattagcggctttttcatcacccattggctgactaacagggctcccgcaaatagagcataaatgacagtaaccttccatttaataaactcatcattgtggaagaacagcgtcaagccaccgaagacgaccaccagaacaaaagtgatcagggccatcttctcaaccttacgaaagcgaacccagctatagataagcacaatcgccgtggcgacgatcagcgccgcagtagccgcatagatgtcataaatcttgtaaaacgcgaaaaagacaaccagcggtaaaaaatcaagaaactgcttcattttacgattccgtaatcaaatgcttaaggttattggcgaatcaacatatacaggcggaacagatagatgagcaatatggcactaatcaggttgctcaaggtgttcgccagtacggcaccaatttccggggttaatgcggcaaaagaagaggcaaaaagcagcaacagtgtttttgccagcaaccagctcagtactgcgggtgccaccagacgcatattcgcccaagtcagccgcatactgctacgcatgctggcaaaaacgcccattttgtcctgtaccaacatcaccggtgccagggccagtaaaatggccatgataattcccggaacgaccaccagcatgatgccaatctgtactaaaagggtagtcagaaaaatcagaataaataactttggcaatatcggcgcactggcaccaatagctcgcagcgcactgactctctgacccgcagacaccagctggataattaatattacgcctccggcgagaatggcgttaccgattaatccactaaaagtggacgccgcactagcctgcagcaaaatttgttgctgttccggactcatattctgaaccaggtcgaacaacccactactgccgctaacgggcacgccgtcattgagctgcgcaagctgtgcatcactgggactgaaaacatgccctaacaccactgtgataaacgcacatagcaagcttaccaacagaatggtcataaattgattacggaagaaatttccggtgtcacggtatacggactgcgccgtgatagacatgcactctccttgagttttatgcaggtgttaattagcgggcaattgtaccctggttaagcctcgggtggcagcatcaggtcttgtatggaaaagcatatctttgtaaagcggaggtaattgctggccttcaggcatgggcaaatcgcggcaagtggcgaccgagttaatatttgcgtagcgaaaatatttaaaaattgatttaaatcacattaaccaggattctcaatgcaacttctaaattaatccagatcaataaagggtgaattatcatatgtaatgtgatctatgtaggatcatttgttactccaatgtaggtatattcgtcacgtttttataaccataacgacggagcggatatgaaaaagttaacagtggcggctttggcagtaacaactcttctctctggcagtgcctttgcgcatgaagcaggcgaattttttatgcgtgcaggttctgcaaccgtacgtccaacagaaggtgctggtggtacgttaggaagtctgggtggattcagcgtgaccaataacacgcaactgggccttacgtttacttatatggcgaccgacaacattggtgtggaattactggcagcgacgccgttccgccataaaatcggcacccgggcgaccggcgatattgcaaccgttcatcatctgccaccaacactgatggcgcagtggtattttggtgatgccagcagcaaattccgtccttacgttggggcaggtattaactacaccaccttctttgataatggatttaacgatcatggcaaagaggcagggctttccgatctcagtctgaaagattcctggggagctgccgggcaggtgggggttgattatctgattaaccgtgactggttggttaacatgagtgtgtggtacatggatatcgataccaccgccaattataagctgggcggtgcacagcaacacgatagcgtacgcctcgatccgtgggtgtttatgttcagtgcaggatatcgtttttaattccgcacaaaaacgaccccgtaatatacggggtcaataaggacatggtataaagggtattatttcttcgcttctacgccatcagtttcagagcgaattaaaaatttctcagttgtttgcggaatattctgaatcagccagtcggccatttgcttttcctcatttaaaatcgcttcgatggttggaatactagctgtatcaccggcattttttgctgctgctaatagactggtgtaacaggcgatttcaaattgctcgaagacatatccgctaatagagcctttgactatttcatcagaagggaatataccaccgatactctgcccaagcgcagccattttactcatggaatctttaatgacactacgactaatgtcattacgatcaagaatagtttccagttgaacaatctggtttttggtttcactaagatgttgttcaatacgagcgcgtagttcaggataattatctatacggctggccatggattcaagcatagattcggcttgcttttccattgcgtgggcgtcacgtaaccagtcatgataatgttcaatacgattcatgaaaatgtcctctttataaaatgactaaaagttaaaattcatatttcaggctttattttcggctttcttatttacgttattaatggccagatcagtcagtttgatgtcggtggccttttcttcttccagggtttctttcagaagcttcgctgctttacggtaacctaattgttcagccagcgtcgctaatgtcccgtaactggcaatctcataatgctcgactttctgtgctgcggcaatcagtgcggcatcacgcacttcgtttttctcggtactttcgatgacctcattagcttcttcaataagaccttccattgccacacatttcatgcgcttaattttcaggttgctttcggactccacaacttgatcaatacgttcaatctgtccatgagtttcctcgaggtgcgcatgaaaagcctgacttaatttttcattacttgttgctcttgcgagttttgccagtgcccgggttaattgtttttctgcgctgtaggtatcactaagcaggtgaataaatacatcttcaatggtcttcatattcatatttttctccagtgaaatcactgcgagccatacggcccgcagatgcaattatctttatcagctgatattaataattaacggtgaatcaggatttgccacttttattaccaccgctttgttgaccgccttttttacccgcttcagatgcgcgttgcggatcatttttaaaattaccgccgctatgctgaccgcctttacggcctgcgtcggatgccttctcacggtcttcggcgaaatttccactaccaccacgatgttcggccatgttatttctcccgttgcgttgcattgtttcattaatatgagtgttgtgtgtcgacactcattaaaattagtcgctaatgagaattagtcaaattaagcgcaacgagaagatagagggaaaatatattttgaggaacattctggatatattaacaattacctgaggaataagtgacttagagaaaattattgattttactggtgttatgttgcgggattaatttgtttgattatattactgttgggcggaaaaatgacgtaagttgacgttcgaccggggtaagcgaaacggtaaaaagataaatattaaatgaatttaggatttttccggcttcattaaagaaagttaaaatgccgccagcggaactggcggctgtgggattaactgcgcgtcgccgctttcatcggttgtacaaaaactttcagtgccgccagcattttctctggctcattaatatgttgctcgatgattttaacaatggcgctaccagaaatcgcgcccgcagctcctgcatcaatcgctgcttttacctgatccggggcggaaataccaaatccctgcaatggaggtgcagcgttgtactctttcagcttcgcaaccagatgattgaggggtaacgcggcgcggttttctgcgccggtcacgcctgctcgactcagcaaataggtgtaaccacgaccgtaagaggctatctggcgcagcaggtcgtcatcggcatttggcgggcagatgaagataggtgcgacattatgacgcaacgcggcctggcggaagggcgcggactcttcaactggcacatcggcaaccagcacgctatcgacgccgactttttcgcactgggcataaaactcatcaatgcctttgttaaacaccagattggcatacatcaacaggccaatgggaatggtcgggtgtttctggcgaatcagtgccagcatttcaaaacattgtgccggagtcacacctgccgcaaaggcgcgcagagtggcgttttgaatcgtcgggccatccgccagtgggtcggagaaggggatacctaactccagcgcgtcagcaccggcttcaattagcgtatcgataattttcaaactctgctcaatgcccggatcaccgagcgtgacgaaaggaacgaatgcgccttctttgcgctccttcaactgggcaaacagagattcgtagcgttccatcagatttcccctcgtgctttcaaaatatcgtgaacggtgaagatgtctttatcgccgcgaccggaaaggttaaccaccagtagctgctctttatccgggttttcgcgcatcattttcaacgcatgggccagggcgtgggaggattccagcgccgggatgatcccttcgtgcaggcacagcgttttgaaggcttcaagggcttcatcatcggtaatagacacgtaatcagcgcgtccagtgctgttaagatacgcgtgttgtgggccgacagacgggaaatccagtccggcggagatggagtaagattcttcaatctgcccgtcttcggtttgcatcatcggcgctttcataccgaaatagatacccacgcgaccatgttttagcggtgcgccgtgctcgccagtttcgataccgtgaccacctggctccacaccaatcaggccgacgttggtttcattgatgaaatcagcaaacatgccgatggcattgctaccgccgccaacacaggcgataacggcatccggcaggcgaccttctctttccagaatctgcgctttggtttcttcgccaatcatccgctgaaactcacgcacaatggtcggataaggatgcgggccagctgcggtgcccagcatatagtgcgcggtttcgtaactaccggaccagtcgcgcagcgcctcgttacaggcatctttcagcgtcgcggaaccgctatgcaccgggatcacttccgcacccattaagcgcatacgaaaaacgttagggctctggcgttcaacgtctttggcacccatataaatacggcatttcaggccgagcagggcgctggcaagggcgctcgccacgccatgctgaccggcaccggtttcggcgatgatttcggttttacccatccgcttcgccagcaacgcctgccccagcacctggttagttttatgcgcgccgccgtgcagcaaatcttcacgcttgagatacagcgtggtgttcgtcccggctgtaatgttctggcatttggtcagcgcggttggacgcccggcatagtttttcagcaggtcgttgaactgagcctgaaattcaggatctttttgcgcactgacaaaagcttcttccagctggcgcagagcaggcatcaggatttgtggcacgtacatgccgccaaactcaccaaaataggggttaagtaatgttgtcattgttcctttccttaatatgcgcgcagcgtctggaaaacgctggccaaaagacgtgcgtctttgatgcccggttggctctctacagcagaattaaaatcaagtccggcgcagccggtttgtgccgcttccacgcagttatctgcgcctaagccccccgccagcagaacgttgccaaggctttgaccatttaatagactccagtcaaaacgttgcccgcttccaccctggccgttgtctaaaacatatttatcaacgtgctgaaactcgcgggcgggcagggtttcaccgacgcttaatgctttccagatggcaacatgtgctggcagagcttcacgcagcgtatcgatatacagctgttcttcattaccatgcagttgcactgccgccaggcttaacaccttagctttgtccaccacatcggcaatatcgtgattgcggaacacgccaacatactgcaacggtgccgcagccatcacttcctgcgcctgttcaacgttgacgcaacgcggacttgtcgcaacaaaaatcaacccaccgtaaatcgcgcccgcgtcataagctgctttagcatcttgcccacgcgtcaggccacatactttattctcacccagcaacacccggcgcacggcggcgtgcaaatcgtcatgggccatcaacgcgctaccaatcagaaaaccgttagcgaagtggcttaactcgcgcacctgagcgtaagtattgatgccggattcgctgattaccgtcacgttgtgccccagtttcggcgcaagctcgcgggtacggttgagatcaatgctcaaatcacgcagatcgcggttgttgatgccaacgacctttgctcccaatgcaatggcgcgctcctgttcctcttcattactgacttcggtcagcacccccatctccagactgtgagcgacggcggcaagctggcgatattggtcgtcatccagtacactaagcattaataagcaggcatcggcctggtaatagcgcgccagatagatctggtaagggtcgataatgaagtctttacataaaatcggctgcggggcgatttggctgacgatggggaggaaattaaagctcccctgaaaatatttctcatcagtcagcacgctaattgcgctagcgtaatgtttataaatggcggcaatgcgtgctggatcgaaatcatcacggatcacgcctttactcgggctcgctttcttgcactccagaataaacgccgtgcgcgcaccctgtagcgcatcataaaaatgtcgcgtgctcggctgaacctcattctgaaaactggccagcggttgctgctgtttgcgggcttctacccaaatcgccttgtctgcgacgattttcgctaaaacggtttgcatcatttaccctcgtgccgccagtgcggtgactctgtcgtaagcggaaccactgcgcagtacctcaagaacggtttgcgcattggcttgcagatcttcatggccatgcaggcgcattaacatggcgacgttcgcagcgacggctgcttcatgggcggcgtcgcctttaccttgtaacaaacgtgttaaaatgtcacggttttcttccggtgttccgcctgccagttgctcctggtggtagggtgtcaggccaaagtcttctgcggtgagctgatagcttttaatttcgccgtcatgcagttcggcaacgattgtcggcgcgtgtaaactaacttcatccatcccgccgctgtgcaccaccgccgcgcgttgataccccagcacgcgcaaggtttcggcaatcggcagcaccagttccggactataaacaccaattaacgccagcggcggatgcgccgggttaatcaatggccccagcacattgaacagggtgcgggttttcagttgctggcgaaccggcatcgcgtggcggaatccggtgtgatacttcggcgcaaagaggaaacatacacctaactcatccagcgcctggcggcttttatcggcgttcatatcaagattaataccgaacgccgccagcagatcggagctaccagatttactggagacgctacggttgccgtgtttcgccactttcagcccacaggccgcggcgacaaacgcactggcggtagaaatattgatactgttgctgccgtcaccgccagtaccgacgatatcagcaaacagataatccgggcgcgggaacggcgctgcgttttccagtagcgcggttgctgccccggcgatctcgttcgggtgctcaccgcgaattttcatgctcaccagcgccgccgccagttgttccggcttcagctcgccacgcaccaccgcactaaacagctggtggctttcttgttggctaagcgtctgcgcctgatacagtttttccagaatcggttgcagcgtgttggctggctctagtttctgctgcgcccaggccagcgtttgttccagcaggcgagcgccctgggtggtgagaatggattccggatggaactggaatccacaaacgcgatccgcatcgtgacgtactgccatcaccatgccattaaaatgggcgttgatggttaaaccggccggaatgttactgccaaccaggctgtgataacgcgccaccggcagcgggtttgttaatccggcaaacatcgcctgaccgtcatgttcaatgctggaggctttaccgtggagaatttcgcccgcctgaccgacatagcccccgtaagcttcgacaatcgcctgatgtccgaggcaaatgccaataatgggcagcttgccacgcaagcgggtgaggagttccggcatacaaccggcttcgctcggcacaccggggccaggagaaagcatcagcaccggattgctcatggtcgccaggcgttcaattaaggtttgcgccggaatatggttgcggtaaatcaccacgttatgcccattgctgcgcaactgatctgccaggttgtacgtaaaagagtcgatattatcgagcagcagaatgtcagccatcagaaagtctcctgtgcatgatgcgcggtggcaatagcgcgcagtacagcgcgggctttgttacgggtttcgtcggcttcgctctgcggaacagaatcaaggactacaccagcacccgcttgcacggtggcgataccgttttccaccagcgcgctgcggatcacaatgcaggtgtcgagatcgccatgcgcggtgaaataacctaccgcgccgccgtagctgccgcggcgacgaccttccgcctcggcaattaactgcatagcgcgtactttcggcgcaccgcttaacgtccccatattcatacaggcgcgataagcgtgcagggcgtcaagatcgtgacgcagttcgccgactacgcgagagacgaggtgcatcacataggaataacggtcaactttggtgagatcggcgacgtagcggctgccgggggtgcaaatgcgtgccagatcattacgggcgagatcaaccagcatcagatgttcagacagctctttatgatcggtacgcatttccagttcaatacggctgtcgagatctctgtccagactaccatcggcgcgacgaccgcgtgggcgtgttccggcaatcgggtagatctcaatctggcggctggtggcatcatacttgaggctgctttccgggctcgcgccaaatagggtgaaatcattatcctgcataaaaaacatgtacgggctgggattactctttttcagcacgtaataggccgccagcggactcgggcagggcagagagaaacggcgagatggcaccacctggaaaatttctccagcgcgaatcgctttttgcaacaaacgcactacgccaccgaactcttcatcgctctgattacattcacaacgcatatgcggcacggaaaccactggcagcggcggcgcggcttcggtcagttgctgacgtagttcgttcaggcgagcagtgagacgttgtttttcttcttcattcggagcaaacaggctggcctgaatacgggtgctttttttctgatggtcaatcaccatcagcgtttcagcgagataaaaacagaaatcagggcagttattttccgcactcagttgcggtaaatcttcaaatcccgccacaaggtcataagagaacaggccgccgaagaacatggcttctcgttcttccttcggtacattcaacagattctgcaataaacggaaagcgtcaaaaacgctaagggagcataagcgggcgtcttcatccagcagtggactgacaggggggaagcgcagcacacggcagtttggactttgttcactttccacacccgcaggcagggcgttatccagtagtgccaggagggcttcgccgttgccggaaagtgcctggattgtgacagtgtcacctaaagctgtaatgcgcagcgcactgtctaccagcagcaggctttttaaatcatctttgctgtcgatatctgcggattccagcagcagcgttgccggacgatccccacacaactggtgaaaaagcgcggtgggattgtcgcgataagcgccttcgcaggttagcagttcgagagtcggtttttgtgtttgcattgttattctctaattttgttcaaaaaaaagcccgctcattaggcgggctgggtatctgattgctttacgcatggtgaatacactgcccgtttcaggaagtgcgccaccaacctttcagtacgaaaattgctttcattgtcgataccctttttacgtgaacttgcgtactagttaactagttcgatgattaattgtcaacagctcatttcagaatatttgccagaaccgttatgatgtcggcgcaaaaaacattatccagaacgggagtgcgccttgagcgacacgaattatgcagtgatttacgacctgcacagccataccacagcttccgatggctgcctgacgccagaagcattggtgcaccgtgcagtcgagatgcgcgtcggcaccctggcgatcaccgaccatgacaccacagctgcaatcgcgccagcaagagaggaaattagtcgtagcggactggcgttgaatcttattcccggcgtggaaatttccacggtctgggaaaatcatgaaattcatattgtcgggctgaatattgatattactcatccgctaatgtgtgagttcctcgcgcagcagacagaacggcgcaatcagcgggcgcagctgattgccgaaagacttgaaaaagcgcaaatacctggggcgctggaaggcgcacaacgactggcgcagggcggcgcagtgacgcgcggtcattttgcgcgtttccttgttgagtgcggcaaagccagtagtatggcggatgtctttaaaaagtatctggcgcgcgggaaaaccggatacgttccgccacagtggtgtacaatagaacaagctattgatgtcattcatcattctggcggtaaggcggtgctagctcatcctgggcggtacaatcttagtgctaaatggctgaaaagattggttgcgcattttgccgaacaccacggtgacgcgatggaagtcgcgcagtgccagcaaagccccaatgaacgtacccagctggcggcccttgcgcgtcagcatcatttatgggcaagtcaaggatctgattttcatcagccatgcccgtggatcgaactgggtcgtaaactctggctgcccgcaggcgttgaaggcgtctggcagctatgggaacagccgcagaacaccacagagagggaattatgagccagtttttttatattcatcctgataacccacagcaacgtctgatcaaccaggcggtggagatcgtgcgtaaaggcggggtgattgtttatccaactgattccggctatgcgctcggctgtaaaattgaagataaaaacgcgatggagcgtatttgtcgtattcgccagctgccggacggtcacaactttaccctgatgtgtcgcgatctttctgaactcagcacctatagttttgttgataacgttgcgtttcgtttaatgaaaaacaacacgccgggcaactataccttcatcctgaaggggacgaaggaagtgccacgccgtctgttgcaggaaaaacgcaaaaccatcggtatgcgtgtgccttctaaccctatcgctcaggcgttacttgaagcattgggcgaaccgatgctttccactagcctaatgctgccaggcagcgaatttaccgaaagcgacccggaagaaattaaagatcgtctggaaaaacaggtagatttgattattcacggcggctatctcgggcagaaaccgacaacggttattgatcttaccgatgatacgccggtcgtggtgcgtgaaggcgtaggtgatgtgaagcctttcttataacaaattgcgttccacggatggaagactatggcagggaagtttcgctgcattttgctgttgatagcagggctgtttgtaagttctctaagttatgcagaaaacacggagatcccttcttatgaagaagggatcagcctctttgatgttgaagccactctgcaaccagatggggtgctcgacatcaaagaaaatattcattttcaggcgcgaaatcagcagattaagcacggcttttatcgtgatttaccacgactatggatgcagcctgatggggacgctgcactgctgaactatcatattgttggcgtcacccgtgatggtattcctgaaccctggcatcttgactggcatatcgggttaatgagtattgtcgtgggcgataaacaacgtttcttgcctcaaggcgactatcattatcaaattcattatcaggttaaaaatgctttcctgcgtgagggggattctgatctgctaatctggaacgtgaccggtaaccactggccgtttgaaatttataagacccgtttttctctccagttctctaatattgcgggtaatccatttagcgaaatcgatctttttaccggagaagagggcgacacatatcgtaatggccgcatccttgaggacggaagaattgaatcccgcgatccgttttatcgtgaagatttcacggtcctctaccgctggcctcacgctttacttagcaatgccagcgctccgcaaacgacgaatattttcagccatcttcttttaccctccacgagtagcttgttaatttggtttccgtgtctgttcctggtttgtggatggttatatctctggaagcgcaggccgcaatttacgccggtagatgtgattgaaaccgatgtcattccgccagattacacgcccggcatgttacgtctcgatgcgaagctagtttacgacgataaaggtttttgtgccgatatcgtaaatctgattgtgaaaggaaaaattcatctggaagatcagtctgacaagaaccagcaaatcctgattcgtgttaatgaaggcgcgaccagaaataatgcggtattactgcccgcagagcagttattactggaagcgttatttcgtaaaggcgataaggtcgttcttacggggagacgcaacagagtcttacgcagggcatttttacggatgcagaaattttatctgccgcgtaaaaagtctagcttttaccggtctgatacttttttgcaatggggtggactggcaatattggcggtcattctttacggtaacttgagtcctgtaggctgggcaggaatgagtctggtgggcgatatgtttattatgatctgctggattattccttttttattttgttcccttgagcttttgtttgcccgcgatgatgacaagccttgcgttaatcgtgtaatcatcactttgtttttaccactgatttgtagtggcgtggccttctattctctctacatcaatgtcggagatgtattcttttactggtatatgccagcgggttattttaccgctgtttgcctgaccggttatctcactggcatggggtatatttttctgccaaagtttacccaaactggacagcaacgttatgcccacggtgaagctatcgttaactatcttgcgcgtaaagaggcagcaacacacagtggacgtcggcggaaaggggaaacacggaaactggattacgcgttgctaggttgggctataagcgcaaatttggggagggaatgggcgttacgcattgcccctagcctttctagcgcgattcgcgctccagagattgcccgtaacggcgttttattcagtttacagacgcacctaagttgcggggccaataccagtttgttggggcgaagttattccggtggtggtgctggcggcggcgcgggtggcggaggcggtggtggctggtaattaagctgatgttaatcgaaacaagctttaaccataaagatagtgtagtatgttgcgcctcaaagccaggccgataaacgtcgagtcgtttacttaaggcctgaagagttcaaacagactttactatcagtgagtcagatgtaagttctgactcactgttgcacaaaagcatatcagacgcctgggaaggcgacaccaaaaggaagctctatgagcgaaaagctacagaaagtgctggcgcgtgccggccacggttctcgccgtgaaatcgaatctattattgaagccggtcgtgtgagtgttgatggcaaaattgctaaactcggcgatcgtgttgaagttacccctggattgaaaatccgtatcgatggtcacctgattagcgtacgtgagtccgctgaacaaatttgtcgcgttctggcctattacaaaccggaaggtgagttgtgtacccgtaacgatccggaaggacgtccaacggtgtttgaccgtctgccaaaactgcgtggcgcacgctggattgccgtgggtcgcttggacgttaatacctgtggtctgctgctgttcaccaccgatggtgaactggcaaaccgtttaatgcacccaagccgtgaagttgaacgtgaatatgccgtgcgtgtatttggtcaggttgacgacgcgaaactgcgtgatttgagtcgtggcgtgcagttggaagatggtccggcagcttttaaaaccatcaagttcagcggcggcgaagggatcaaccagtggtacaacgtgactctgaccgaaggccgtaaccgtgaagttcgtcgtctgtgggaagcggttggtgtgcaggtgagccgcctgatccgtgttcgttacggtgatatcccactgccaaaaggtctgccacgcggtggctggacggagctggacctcgcccagactaactatctgcgcgaactggtggagctaccgccagaaaccagctctaaagtcgctgtagaaaaagaccgtcgtcgcatgaaggcgaatcagattcgtcgtgcggtgaaacgtcacagtcaggtgagcggcggtcgtcgttctggcggacgtaataataacggttaatcaaagtatgccggacgtcatatccggcatttttacagattaataatcgatccctatctgcgcttttacaccggcatcaaacgcatgtttgacggggcgtaattcacttaccgtatctgccagttcaagaatatcccgatgacaaccacgacccgtgataatcaccgtctgttgatgtggacgttcatttaacgcctgcaccacttcttccagtggcaaatagtcatacgccaccatatacgtcagttcatcaagcaaaaccatatccagactggaatcagcaagcatccgctttgcatgttgccagacttcgcggcaggcggcggtatcagactcgcggttttgtgtatcccaggtaaagcccgttgccatcacctgaaactcaacgccatgtggctccagcagattgcgttcgccattaggccaggtgcctttaataaactgcacgacgcctactttttttccgtgaccaactgcgcgtgttgccgtaccaaatgccgcggtggttttgccttttccattgccggtaaagacgatgataataccgcgttcatcctgggcctgggccacacgagcatctactttttctttcactcgctgctgacgctgttggtagcgttcatcactcattgggaaattcctggtttacggcccggttgggcgtcaaaggtcatgccggttttacggcggctgtcatcgcccatcagccagaggtagagcggcatgatatcagcgggtgttttaagtttctgtggatcttcggtcgggaaggcgctggcacgcattgcggtgcgcgtaccgcctgggttaatgcagttgacacgcaggcgctgctgatattcatcggccagtacctgcatcatcccttcggtggcaaatttgctcgctgcatatgcaccccagttggctcgtccctgacgtccaacgctactactagtaaagaccagactaccggcgtcgcttttgagtaataaaggaagcagtgcctgggtgagcataaaggtggcattaacgttgacctgcatgacgtcctgccagacctgcggattttgttcgctcattgggcaaacatcgccgagcaatccggcattatgcaaaacaccatccagacgcggataattaacggcaatgcgctgtgccagttgttggcaattttcggacgtgcaggtcagcaaatcgagaataaaccactgtggctgacgcccagtttcttcgtttatgtggctggctacctgacgtaatttttcttcattacggcccaacagaatcactgtcgcaccatagcgtgcatacgtcatcgcggcttcacgaccaataccatcgctggctcccgtcaccaggataatgcgatcattgagtaaatcttgttttggctggtaatgcatggctactcctcaacgacgttgtctgtcgcgctgccagtgtactttatgactttggggctttatgcctgaaacagaagggcatttcaatcagcctggggcgataacaccgcaaaatggatactttgtcatactttcgctgcaataacatctctgcgagacggcttaacatgcctgttgtaaactgtgagccaaagcgttgtttaaccaaggtggggactcgtggaattgttgtctgaatatggtttgtttttggcgaaaatcgttaccgttgtgctagcgattgcggcgattgccgccattattgtcaatgttgctcaacgtaataaacgccagcgtggcgagttacgggtcaacaatctcagcgaacagtataaggagatgaaagaagaactggccgcggcgctgatggacagtcatcagcaaaaacagtggcacaaagcgcagaagaaaaagcataagcaagaagcgaaagcagcaaaagcgaaagccaaactgggcgaggtggcaactgacagtaaaccccgcgtctgggtgctggattttaaaggcagcatggacgcccatgaagtgaacagcctacgtgaagagataacggctgtactcgcagcattcaaaccgcaggatcaggttgtgctccgtctggaaagccctggtggcatggtgcatggttacgggctggcggctagccaactgcagcgtctgcgcgataaaaacattcctttaactgttacggtagacaaagtcgctgccagcggcggttacatgatggcctgtgtggcggacaaaattgtttccgcaccgtttgctattgtgggttccattggcgtggtggcgcaaatgcccaactttaaccgcttcctgaaaagcaaagatattgatatcgaactgcacactgccgggcagtataagcgcacgctgacgttgctgggtgaaaataccgaagaagggcgggagaaattccgcgaagagttgaacgaaacgcatcagttgtttaaagattttgtgaagcgtatgcgtccttctctggatattgaacaggtggcaacgggtgaacactggtacggacaacaggcggtagagaaaggcctggttgatgaaatcaacaccagtgatgaagttattcttagcctgatggaaggccgtgaagtggtcaatgtacgctatatgcagcgtaaacgactcattgaccgattcaccggcagcgcggcagagagcgccgatcgattgttgctacgctggtggcagcggggtcaaaagccattgatgtaaaagacaaacgcgaggctaagacctcgcgttttgctttaatcaaccagatgatatttttcactaagcacatgggccaggtgtttgaacatattaaacaccgcggtgcttttggctgttggcaatccttgttcatctaaaaagtagtcgccggtaaataccagcacgccattacgctgcgtgacgccggtggcttcaatccctgcgagcgtatcctcatgctcacgaatgattttgttggcctctttcaacagcgtttcgcggtcgatgggttgtgtctctttgttcattatttactccttaaacaaggacattagtctacgccaggcatggcttgcagacaaatataccacgctggtggcaagagcgccttactggcaactttggattttgcatgctaataaagttgcgtatcggattttatcaggtacagtgtgacgctttcgtcaatctggcaatagatttgcttgacattcgaccaaaattccgtcgtgctatagcgcctgtaggccaagacctgttaactcagtcacctgaattttcgtgaacagagtcacgacaaggggttgatatccgcagagagcgagtccatatcggtaactcgttgccagtggaaggtttatcaacgtgcgacgcattcctggaagaatcaaattaggtaaggtgaatatgggtaaagctcttgtcatcgttgagtccccggcaaaagccaaaacgatcaacaagtatctgggtagtgactacgtggtgaaatccagcgtcggtcacatccgcgatttgccgaccagtggcagtgctgccaaaaagagtgccgactctacctccaccaagacggctaaaaagcctaaaaaggatgaacgtggcgctctcgtcaaccgtatgggggttgacccgtggcacaattgggaggcgcactatgaagtgttgcctggtaaagagaaggtcgtctctgaactgaaacaactggctgaaaaagccgaccacatctatctcgcaaccgaccttgaccgcgaaggggaagccattgcatggcacctgcgggaagtgattgggggtgatgatgcgcgctatagccgagtggtgtttaacgaaattactaaaaacgcgatccgccaggcatttaacaaaccgggtgagctgaatattgatcgtgttaatgcccagcaggcgcgtcgctttatggaccgcgtggtggggtatatggttagcccgctgctatggaaaaagatcgctcgtggcctgtctgccggtcgtgtgcagagcgtggcggttcgcctggtggtcgagcgtgagcgtgaaattaaagcgttcgtgccggaagagttctgggaagtcgatgccagcacgaccacgccatctggtgaagcgttggcgttacaggtgactcatcagaacgacaaaccgttccgtccggtcaacaaagaacaaactcaggctgcggtaagtctgctggaaaaagcgcgctacagcgtgctggaacgtgaagacaaaccgacaaccagtaaacctggcgctccttttattacctctacgctgcaacaagctgccagcacccgtcttggatttggcgtgaaaaaaaccatgatgatggcgcagcgtttgtatgaagcaggctatatcacttacatgcgtaccgactccactaacctgagtcaggacgcggtaaatatggttcgcggttatatcagcgataattttggtaagaaatatctgccggaaagtccgaatcagtacgccagcaaagaaaacagtcaggaagcgcacgaagcgattcgtccttctgacgtcaatgtgatggcggaaagcctgaaggatatggaagcagatgcgcagaaactgtaccagttaatctggcgtcagttcgttgcctgccagatgaccccagcgaaatatgactccacgacgctgaccgttggtgcgggcgatttccgcctgaaagcacgcggtcgtattttgcgttttgatggctggacaaaagtgatgcctgcgttgcgtaaaggcgatgaagatcgcatcttaccagcagttaataaaggcgatgctctgacgctcgttgaacttacaccagcccagcactttaccaagccgccagcccgtttcagtgaagcaagcctggttaaagagctggaaaaacgcggtatcggtcgtccgtctacctatgcgagcatcattagcaccattcaggatcgtggctacgtgcgagtagaaaatcgtcgtttctatgcggaaaaaatgggcgaaatcgtcaccgatcgccttgaagaaaatttccgcgagttaatgaactacgactttaccgcgcagatggaaaacagcctcgaccaggtggcaaatcacgaagcagagtggaaagctgtactggatcacttcttcagcgatttcacccagcagttagataaagctgaaaaagatccggaagagggtggtatgcgcccgaaccagatggttctgaccagcattgactgcccgacttgtggtcgcaaaatggggattcgcacagcgagcaccggggtattccttggctgttctggctatgcgctgccgccgaaagagcgttgcaaaaccaccattaacctggtgccggaaaacgaagtgctgaacgtgctggaaggcgaagatgctgaaaccaacgcgctgcgcgcaaaacgtcgttgcccgaaatgcggcacggcgatggacagctatctcatcgatccgaaacgtaagttgcatgtctgtggtaataacccaacctgcgacggttacgagatcgaagagggcgaattccgcattaaaggttatgacggcccgatcgttgagtgtgaaaaatgtggctctgaaatgcacctgaaaatggggcgtttcggtaaatacatggcctgcaccaacgaagagtgtaaaaacacacgtaagattttacgtaacggcgaagtggcaccaccgaaagaagatccggtgccattacctgagctgccgtgcgaaaaaagtgatgcttatttcgtgctgcgtgacggtgctgccggtgtgttcctggctgccaacactttcccgaaaagccgtgaaacgcgtgcgccactggtggaagagctttatcgcttccgcgaccgtctgccggaaaaactgcgttatctggccgatgcgccacagcaggatccggaaggtaataagaccatggttcgctttagccgtaaaaccaaacagcaatatgtctctagcgaaaaagacggaaaggcgactggctggagtgcattttatgttgatggcaaatgggttgaaggaaaaaaataacctttaattctgtcaggtttttataaacaaagggtcgcgaaagcggcccttttttattgcatattattttttcttcacacctatacactaaggctataaatgatatagtggttatagttagcaccttttttattattaaatcgtattagtcacccgccaggtgtgacgaaaaaacgatgttctgatggcgtctaagtggatggtttaacatgaaattacaacaacttcgctatattgttgaggtggtcaatcataacctgaatgtcagtagtacagcggaaggactttacacaagtcaacccgggatcagtaaacaagtcagaatgctggaagacgagctaggcattcaaattttttcccgaagcggcaagcacctgacgcaggtaacgccagcagggcaagaaataattcgtatcgctcgcgaagtcctgagcaaagtcgatgccataaaaagcgttgccggagagcacacctggccggataaaggtagtctgtatatcgccaccacgcatacccaggcacgctacgcattaccaaacgtcatcaaaggctttattgagcgttatcctcgcgtttctttgcatatgcaccagggcagcccgacacaaattgctgatgccgtctctaaaggcaatgctgatttcgctatcgccacagaagcgctgcatctgtatgaagatttagtgatgttaccgtgctaccactggaatcgggctattgtagtcactccggatcacccgctggcaggcaaaaaagccattaccattgaagaactggcgcaatatccgttggtgacatataccttcggctttaccggacgtagtgaactggatactgcctttaatcgcgcagggttaacgccgcgtatcgttttcacggcaacggatgctgacgtcattaaaacttacgtccggttagggctgggggtaggggtcattgccagcatggcggtggatccggtcgccgatcccgaccttgtgcgtgttgatgctcacgatatcttcagccacagtacaaccaaaattggttttcgccgtagtactttcttgcgcagttatatgtatgatttcattcagcgttttgcaccgcatttaacgcgtgatgtcgttgatgcggctgtcgcattgcgctctaatgaagaaattgaggtcatgtttaaagatataaaactgccggaaaaataatttcttgcgttattttcggcaccttttatgtagcgaaggtgccggaatatattctcttttgttacttatttctataccgtgcacaatatttttatccctcatatttatagggtaaattacctgtaaagtagtgtctaattacccgcctcgcaaactccagttttcaaatatctatttcaggtcaaaagattgaattattcactggagacgattcgtaaattcgctggatttttgactaaagtttctttaggatttgtctcatcgtatgattaattacaccaatcgttcaacgtcttgctgataagtgatggcgattatatgaggttagcaatgccttctggaaatcaggaaccccgccgcgatcctgaattaaaacgtaaagcctggctggcggtttttcttggttctgcacttttctgggtggttgtcgcactgctgatttggaaagtgtggggataactatggtcggtcaggagcaactggagtcgtcaccattatgccagcatagtgacaatgaaacagaaacgaaacgggaatgttccgtcgttattccagacgactggcaactaacatcgcagcagcaagcctttatagaactgtttgctgaagatgatcagccgaaacaataattatcatcattcttattacccatttttaatgaattaaagggcttttaatacaccgcagcaataacagcttgagttatctcaacacaaaataataaccgttaagggtgtagcctatgatcaacacaaatatgaaatattggtcctggatgggcgcgttttctctgtcgatgctcttctgggccgaactcctctggatcattactcactgatccttgaccccgctgcggcggggttgtcatttgctttgccacaaggtttctcctcttttatcaatttgggttgttatcaaatcgttacgcgatgtttgtgttatctttaatattcaccctgaagagaatcagggcttcgcaaccctgtcattaaggaggagctatgagcagtaccctacgagaagccagtaaggacacgttgcaggccaaagataaaacttaccactactacagcctgccgcttgctgctaaaagtctgggcgatatcacccgtctacccaagagtctcaaagttttgctcgaaaacctgctgcgctggcaggatggtaacagcgttaccgaagaggatatccacgcgctggcaggatggctgaaaaatgcccatgctgaccgtgaaattgcctaccgcccggcaagggtgctgatgcaggactttaccggcgtacctgccgttgttgatctggcggcaatgcgcgaagcggttaaacgcctcggcggcgatactgcaaaggttaacccgctcagtccggtcgacctggtcattgaccacagcgtgaccgtcgatcgttttggtgatgatgaggcatttgaagaaaacgtacgcctggaaatggagcgcaaccacgaacgttatgtgttcctgaaatggggaaagcaagcgttcagtcggtttagcgtcgtgccgccaggcacaggcatttgccatcaggttaacctcgaatatctcggcaaagcagtgtggagtgaattgcaggacggtgaatggattgcttatccggatacactcgttggtactgacagccacaccaccatgatcaacggccttggcgtgctggggtggggcgttggtgggatcgaagcagaagccgcaatgttaggccagccggtttccatgcttatcccggatgtagtgggcttcaaacttaccggaaaattacgtgaaggtattaccgccacagacctggttctcactgttacccaaatgctgcgcaaacatggcgtggtggggaaattcgtcgaattttatggtgatggtctggatagtctaccgttggcggatcgcgccaccattgccaatatgagcccagaatatggtgccacctgtggcttcttcccaatcgatgctgtaaccctcgattacatgcgtttaagcgggcgcagcgaagatcaggtcgagttggtcgaaaaatatgccaaagcgcagggcatgtggcgtaacccgggcgatgaaccaatttttaccagtacgttagaactggatatgaatgacgttgaagcgagcctggcagggcctaaacgcccacaggatcgcgttgcactgcccgatgtaccaaaagcatttgccgccagtaacgaactggaagtgaatgccacgcataaagatcgccagccggtcgattatgttatgaacggacatcagtatcagttacctgatggcgctgtggtcattgctgcgataaccagctgcaccaacacctctaacccaagtgtgctgatggccgcaggcttgctggcgaaaaaagccgtaactctgggcctcaagcggcaaccatgggtcaaagcgagcctggcaccgggtagcaaagtcgtttctgattatctggcaaaagcgaaactgacaccgtatctcgacgaactggggtttaaccttgtgggatacggttgtaccacctgtattggtaactctgggccgctgcccgatcctatcgaaacggcaatcaaaaaaagcgatttaaccgtcggtgcggtgctgtccggcaaccgtaactttgaaggccgtatccatccgctggttaaaactaactggctggccagcccgccgctggtggttgcctatgcgctggcgggaaatatgaatatcaacctggcttctgagcctatcggccatgatcgcaaaggcgatccggtttatctgaaagatatctggccaagcgcacaagaaattgcccgtgcggtagaacaagtctccacagaaatgttccgcaaagagtacgcagaagtttttgaaggcacagcagagtggaagggaattaacgtcacacgatccgatacctacggttggcaggaggacagtacctatattcgcttaagccctttctttgatgaaatgcaggcaacaccagcaccagtggaagatattcacggtgcgcggatcctcgcaatgctgggggatagtgtcaccactgaccatatctctccggcgggcagtattaagcccgacagcccagcgggtcgatatctacaaggtcggggtgttgagcgaaaagactttaactcctacggtagccggcgtggtaaccatgaagtgatgatgcgcggcaccttcgccaatattcgcatccgtaatgaaatggtgcctggcgttgaaggggggatgacgcggcatttacctgacagcgacgtagtctctatttatgatgctgcgatgcgctataagcaggagcaaacgccgctggcggtgattgccgggaaagagtatggaagtggctccagtcgtgactgggcggcaaaaggtccgcgtctgcttggtattcgtgtggtgattgccgaaagctttgaacgaattcaccgtagcaatttaattggcatgggcatcctgccgctggaatttccgcaaggcgtaacgcgtaaaacgttagggctaaccggggaagagaagattgatattggcgatctgcaaaacctacaacccggcgcgacggttccggtgacgcttacgcgcgcggatggtagccaggaagtcgtaccctgccgttgtcgtatcgacaccgcgacggagttgacctactaccagaacgacggcattttgcattatgtcattcgtaatatgttgaagtaacaactatttgcttgccggttattttgcttccggcaagcaaatgaattacacaatgcaagagggttatttgttcagcaaatggcccattttctcggctttggtatcgagataatgttcgttattggggttacgacctacaatcaatggtacgcgttcaacaatattaatccctgcttcggtcagaatttcgacttttttcgggttattggttaacaagcggacttcattgacgccaaggagtttgaacatatcagcgcaaagagtgaagtcgcgctcatcagcggcgaagcctaactggtggttagcctctacggtatcgtaaccttgatcctgcagtgcgtaagcgcggattttattcagcagaccaatgttacgaccttcctgacggtgatacagcaaaataccacggccttcctcggcaatttgcgtcaatgccgcttcgagctggaagccacaatcgcagcgcaagctgaacagggcgtcaccggtcagacattcggaatggacgcgcgcaagtaccggggtatgcccggaaatatcgccatagactagcgcgacatgatcgtgtccggttgccagttcttcaaatcccaccatcaggaaatcgccccatggggttggcagtttggcttctgccacacgtttaagctgcatgaaattctccagataatgctggttctgtattggcttattttgccataacgagaaggggttcacctaatcacgacgcgtcgatcgttcacggaatggcacaaatctgtcaatttttcctggaactggcgttttcagttatgattgtgggacttatcaaaaaggagaggccatgcgtagcattgccagacgtaccgcagtgggagctgcactattgcttgtcatgccagtagccgtatggatttctggctggcgttggcaacctggagaacaaagttggctactaaaagcggctttttgggttactgaaactgtcacccagccctggggcgtcattacacatttgattttattcggctggtttctctggtgtctgcgttttcgcattaaggctgcctttgtattatttgccattctggcggccgcaatccttgtgggacaaggcgttaaatcctggatcaaagacaaagtccaggaaccacgaccttttgttatctggctggaaaaaacacatcatattccggttgatgagttctacactttaaagcgagcagaacgcggaaatctagtgaaagaacagttggctgaagagaaaaatatcccacaatatttgcgtagtcactggcagaaagagacggggtttgcctttccttccggtcacacgatgtttgctgccagttgggcactgctggccgttggtttgctgtggccgcgtcggcgaacgttaaccattgctatcttgctggtctgggcaacgggagtcatgggaagccgcctgctgctcgggatgcattggccacgcgatctggtagtagctacgttgattagctgggcgctggtggcggtggcaacgtggcttgcgcaacgaatttgtgggccattaacaccacctgcggaagaaaatcgcgaaatagcgcaacgagaacaagaaagttaacgctggttgattttccgaatttagcccttaaatcatcaacaatgcgtgtggatgccatttcgcagacggcgcgaaaatggtactttaaagggctattgcggtaagttgaccataatttattcgctctaaccacataacgggaagtaatgtgaaatatttactcattttcttactggtgttagcgatcttcgtgattagcgtcacgttgggtgcgcagaacgatcaacaggtgacgtttaattatctgttagcgcaaggggagtaccgtatttccacattgctggcggtattgtttgctgcggggtttgctatcggttggttgatttgtggcctgttctggctgcgagttcgtgtttccctggcgcgcgctgaacgtaaaataaagcgactggaaaaccagcttagtcccgcgactgacgtggctgtagtgccgcacagcagtgcggcgaaggaataactttctatgctggagttgttgtttctgcttttgcctgtagccgctgcctatggctggtatatgggccgcagaagtgcgcaacaaaacaagcaagatgaagccaaccgcttgagccgtgattacgtagcgggggttaacttcctgcttagtaatcaacaggataaagcggtagacctgtttctcgatatgcttaaagaggatacaggcaccgttgaagcccaccttacgctcggaaacctgttccgtagccgtggcgaagttgatcgcgctattcgcatccatcagaccctaatggaaagcgccagcctgacctatgaacagcgtctgttggcgattcaacaactggggcgtgattacatggccgccgggttatatgaccgcgcggaagacatgttcaatcagctgaccgatgaaactgacttccgcattggcgcgctgcaacagttgctacaaatctaccaggctaccagtgagtggcagaaagcaattgatgttgccgaacgcctggtgaagctgggtaaagataaacagcgcgtcgaaattgcccatttctactgtgagttagccctgcagcatatggccagcgacgatctcgatcgtgccatgaccttgctaaaaaaaggggcggcggcagataaaaacagcgcccgcgtatccataatgatgggacgcgtgtttatggcgaaaggagaatacgccaaagccgtcgaaagtctgcaacgcgtgatatcccaggacagagaactggtcagcgaaacgctggaaatgttgcaaacctgctatcagcagttgggtaaaactgccgaatgggcagaattcctgcagcgtgcggtggaagagaacaccggtgccgatgctgaattgatgcttgctgatatcatcgaagcgcgcgacggtagtgaggccgcacaggtctatattacgcgccagcttcagcgtcatccgaccatgcgtgtgttccataagttaatggattaccacttaaatgaagcggaagaagggcgtgccaaagagagcctgatggtgctgcgtgacatggttggcgagaaggtacgtagtaagcctcgttatcgttgccagaaatgtggttttaccgcatacaccctctactggcattgtccgtcttgtcgggcctggagtaccattaaaccgattcgcggtcttgatggcctgtaatttttaaaaaaaatccgactttagttacaacatactaattattaatgttccattgtgctccggcaacgacggcgcagaaaaagcctgccaggggagaaatcgcaactgttaattttttatttccacgggtagaatgctcgccgtttacctgtttcgcgccacttccggtgcccatcatcaagaaggtctggtcatgacgttaactgctagttcttcttcccgcgctgttacgaattctcctgtggttgttgcccttgattatcataatcgtgatgacgcgctggcctttgtcgacaagatcgacccacgcgattgtcgtctgaaggtcggcaaagagatgtttacattgtttgggccacagtttgtgcgcgaacttcaacagcgtggttttgatatctttcttgacctgaaattccacgatatccccaacactgcagcgcacgctgtcgctgctgcagctgacttaggcgtgtggatggtgaatgttcatgcctctggtggggcgcgtatgatgaccgcagcgcgtgaggcactggttccgtttggcaaagatgcaccgcttttgattgctgtgacagtgttgaccagcatggaagccagcgacctggtcgatcttggcatgacactgagtcctgcagattatgcagaacgtctggcggcactgacgcaaaaatgtggccttgatggtgtggtgtgttctgctcaggaagctgtgcgctttaaacaggtattcggtcaggagttcaaactggttacgccgggcattcgtccgcaggggagtgaagctggtgaccagcgccgcattatgacgccagaacaggcgttgagcgctggtgttgattatatggtgattggtcgcccggtaacgcaaagcgtagatccagcgcagacgctgaaagcgatcaacgcctctttacagcggagtgcatgatgagtgattccaacagccgtctggtctacagtacggaaaccggacgtattgatgagtccaaagcggcccctgtacgccctaaaggcgacggtgtggtgcgtattcagcgtcagaccagtggacgtaaaggtaagggcgtttgcctgattaccggtgtcgatctcgatgatgccgaactgacaaaacttgcagcggaactgaagaaaaaatgcggctgcggcggagcagttaaagatggagttattgaaatccagggcgataagcgtgatttattaaaaagtctacttgaagcgaaagggatgaaggtaaaactcgcaggcggttaacataaaaagccacggatatatccgtggctttcgaatattttactgtgcgtattattcagttatttcgtactgaacagaatcaagcgtattataattgcgagtcgataatcgacatttatttacgattatttaccgacctggtgaccaataacacctccgacagctgcaccacctaatgtacccaacgtactgccatcggtcagtactgcaccgcctaatgcccctgcacccgcgccgattgcggtgttgcggtcccgtttagaccagttagaacaggcactcagagacattgccaaagtaattgccagaacagccgcggtcatttttttgctcgttacaaacataatactctctcctgaatttatgattcacggaagtaagctctctataactataatagctaagaataagtctggtgaaattattccgtgaaatctgctcgcgcgcagggttatatcacgcaggtgataatgacttcctgttatatcgctgataataattttatatcttgagagtgttaataacaggtaaatagtcttaattatcaaccaggaatcatcttagagcggatgatttgccaaactgcaaatcatccgtagagaagggaaatggttaaatgtcaacgacgtgaatggtgagtttactgtgctcaagatgcatcagatcgctggcgcgtattttgctatcggtaatcacgcgattgaatcgctcaacgggaccgatggagtaactatgtacagcaccaaatttgctgctgtcagtcaggactatcgcttcgcactctttttccagcacggcattgaccacatcggtacgcatcatatcgcgaccggtaaatccagtttcaggttgccagccatcaataccaataaatgctttgctgaaatgcacctgttggatgcactggcgtgtcaaagggccaaccatactttcgctttttttctgatacacgccaccgagcaaaataacttcacaaggcgcgtctttcagcaaatgcgcgatgtagctgctgaccgtgatgatagtgacatttttcttctgctcgcccagagtccgggcgagtagggcattgctgctgccattttcgataaagatggtttcgcccggttgaaccaggctcgcggcaaactcggcgagttcacgcttcagcgtatagttgctcatcatacgggtttcgacgtcatcactatcaaggctaacagcaaagccatgtgcacggcggaggtaactcagtttttcgagtgtgttgagatcctggcgaatggtaacttcagaaactccagtggcttttgccagatcggttacgctaacctgaccctggtcaatgaccatctgtagaatagtttgttgtcgggaattcatcgctgtaattcttataacgttataatacttaataaaaaaatactgacgcgccgggcatcctcaaataggaaaacctgaaggcacgattgttaaatctcccacggtgccttcgggatgtctggcgtagattcagcaacctggcgcaagagttctgctttaagtatctcgagattatggatcgcagagtggtaatcgcctgccacaaggatatctaacacaatatcaatacgttcggcaacgcgctgggcatcaaattcagacatcaaggacatccttatagcaaaagggggaaaatgaataatgcaaaaattgccgctaaaagagaagtgtttaacagcaacggctaattatcatccaggaatacgatatataatgacgggatatagcgctaagtatatatattcatctacttatgcgcgcttcagatagcgtttataccagcgttcgaaggcgacggcgggcatcggtttggcaaacaaaaatccttgccgctcattgatcccgttcttggttaaaaaagcatcttcctttgcactctctacaccttcggcgatcacctgaagattcaatgcctgggccacagcgacgatcgcccggaccagactctggctgacaggttgtttgtgaatatctcgaacaaaaacctggtcaagtttgatggcatcgatcggaaagcgcgccagttggctaagactagagtagccggtaccaaaatcatccagatgcacttgcgcacctagttggctaaattgttgaataacagacagtgccagttcatcattctcaatcagacaactctctgtcagttcaacatctatagggcagtattcaaaattgagttcctggagaacctgtttcagggcggtgaaaatggtttgatcggcgagctgacgtgcagaaatatttaccgccactcgcaggtttatgcctttatcccgccactttgccacctggcgtacgacatcgagaatcacccaacggcctaaaggcacaattagcccactctcttcggcgtaggaaatgaagtccaacggtggaatcaacccacgttcaggactctgccaacgtactagtgcttccagactgcgcacttcgccacgccaggtgattttcggttgatagtgaataaccaactgatcgttttccagtgctttacgcaagttggtatccagccagagatattcaaatacccgttgattcatttctggggtaaaaacgcaaaattgtcctcgtccgccttccttcgctgtgtacattgctgtgtcggcgtgacgaataatagccgtgctgtcactaccatgttcgggagagagtgcaatacctacactacagctggtataaacttcaattaaaccaatgcgaaaggggagccgtaagcgggtcaaaattcgacttgccattgcttccagcgcgctttgactggtgttggatgccagtaccagaaactcatccccacctggacgagccaacacctggtcatgttcgagacagcttaaaatagccaaactcacgtcgcgtaataactggtcaccaaacaaatgcccataggcgtcgttgacctttttgaaattatccaaatcaagatacacaaccccaactttattgttatctgcatgattaatagcgtgatcgattaaatcctgcattgcgttacgattcggcagtccggtgatactgtcggtatttgccagaatacgcagtcgctcctgagcgcggcgctcttcggtaatgtcggtgccggaacagattaaaaaaatctcgtttttgccactgccgctgtggacaaatttattgcgaaacagaaacagccgctggcctttacatgttggtatccacagttcgacttcatatgcattgccgcttcgaaaaaatacacggttattgcgcctggatgccgcagcttcacgacggctcataaacagtttaaacacgctttgcccaatgacgtcgtgttctttcaaccctgtgtaatcttcacataaccgattgaagcgttggatattcccccggctgtcgagaatcactattgcggaatgtgcttcagaaactacctgctcagcaaaggaaagcccgtgacttaaatcacgagcaaccgccggtgtgtcatgccatgcagacgcgttgccagcccattcccgtttattgatttttcgtcctaccagatgcacagaaagatcgctttcatcgacggtcagactcatcatcaggctggaggtgatgaccgtcatttccctgatgcgagcagcctgttcggcagataactgcaatgtacgatcaggttctgtggtttcggtggtagaaaagcgcaaaacatcgctgctttccgtcaaccgccagtatggattgtggcttccgagaaagttgtacaacgttgtggactccctaacggttttcatgatgcatatcctccggttaacagcggagtccgcggttaaataaaaggaacaacatgacttacatgaaattaacggcggctaaacgcattgttttttttatatatttatttgtaatccagttttggaaaaacgccagttttcaaacgaaagtcagttaaaaaatctgcctggatataacgaaggtagagcggggaaataaacggcccatccatgaggaatgggccgtgaaaggagattacgcgaccgggcgcgcaataatgctgcgggtttccatgcggacttcggcaatagtgacgtcaataacgtcagtcactttgtaaaccgtttcacctttaatttgtacagtgccgttttcctggctgcaaaccagttcatcgcgcacagcgtgtaagaaaggtgccggaataaaggcgatagcgccgttatcaaccaaacgaacacgcatgccgccacggctgatatcgacaatttccgctgcgaaacgggtgtcggtcccggctttgtctttcaggaagcgtgcgtataaccagtcaccaacatcacgttctgccatccggttgagacggcgacgctcggccatttggacagtgatttcatcctgtgggcgcgtcgcagtttcgcctttgataaccgctttcagcagacggtggttgatcatgtcgccatatttacggatcgggctagtccaggtggcgtatgcttccagaccgaggccaaagtgaggaccgggttcagtgctaatttcagcaaaactctggaagcgacgaatgcggctgtcgaggaaaccagttggttgcgcgtccagttcacgacgcagtttgcagaaaccgtccagcgtgagcacttcttcggcatcgacatgcagaccgtgcgttttcagcaacgctgccagcgcgtcggcattcgccggatcaaagcccatatgcacgttatagatgccaaaaccgagcttatcgcgcagtacgcgggccgcacaaatgttagcggcaatcatcgcttcttcgacgatacggttggcaatgcgacgaggctcggcgacgatatccagcacttcacctttttcaccgagaataaagcggtaatccgggcgatctttaaacaccagtgcgtggttatgacgccactcgccgcggcgttggcaaatttgcgctagcaaacggacttgttcggcaattgcttcactttcaggctgccagtcaccggtattttccagccagtcagaaacctggtcatacaccagctttgctttggattcgatggtggcggcaaagaattcgatattatcttcaatggtgccatcagcggagagcgtcatgcggcatgccagtaccgggcggacttcattggcgcgcagactgcagagatcgtcagaaagctcgcgaggcagcatagggatgttgaagccaggcagatagttggtgaatgcgcgaattttcgcggctttgtccagcttgctgccttcagcaatccacgcggttggatcggcaatcgccacaatcagctgaagtttgtcatccggcaacgccttagcgaaaagggcgtcatccatatcttctgtgctggcactgtcgatggtgacaaaatccagcgcggtcagatcttcacgaaccagaccttcatcgagcatttcggtagcgacgccgtctggtgcttctttttccagattatggcgtgcaagggtaacccaccacggtacaaagtgatcgtcaccaaaagtgatgtattgtgtcagttctgcatagaaagaacgatcgcctttcagcggatgacggcgcatttcggcaaccgcccagtcgccttctttaaactcgtggttcaggccacgggctgcgcggcaaggaatggcgtcttttaagagtggatgatcaggaacgatggccagacggtcatttttgccctgaaccttacccacgaaacgagtcaggaacggttcaaccagttcttctggctctgcggattcacgttctttttcactgtggatcaccgcgataattcggtcgccatgcatgacttttttcatctgcggcggcggaatgaaataacttttttgcgcgtcgacttccaggaagccaaagcctttttctgtggcttttaccaccccttcagcgcgtggcgtctgggaatgcagttgctgtttaagctgcgctagcagcgggttgtcctgaaacataattgtctattttggtggccattagagcggctgacagttttacgcgaatctgtctgacgcggcaaggttaatatgtctcacccaacgcgatttttaagcgatttatccagccacacagcccgctccataccagcagattaataatctgcgtactacttttttcgtgttcgagtaaagggctgaactgggcggcgctaaagcgatcgggtgctcgggtcagccattgtatcgcctgaacggtagcgcgctcaacagaatgacggtcagcccattggttaatttcattttcgcccttgcgcataagggtgctgatttttttatattcattactactatccatacaggtggcaaaacaagcaggactgccatttatacgcgcgcataacaacgccgcaagctgattatccggctgtgtattgccccgtgtgctgtttaacaacttttcgagaagggaaagactaatagggtggagagagagtatttcggccagttggcaaagttctgcagtactactttttgtgtgctcttcaggtagtttttccacctcatagctgcttcgccagcgtaaactttcatcagcaaacagactcgcgtcggcgtagttttgtatctccagcccgggtaaccagcgtaccggatgcccgagataagcctgaaatgtcgcaattgtccgcgcctgaaagccaataaaaccaatgatttggctaatgatcacacagtcccaggcagtaagaccgacgtcattcagatgctggcggcttcggttgtcgataatagaagggctgctagccagttggcgggcatattgcgtgatttgtgccaaccgatgattactttccctggtggaatcaggcccggggagcggcgtaagtcgcgcgctatagtagttacataaccgctggacgccgcaaacctgagcaaccgtcagggccgtgctcaagcgttcataagcggtgaaggtctgactacgggtcacggtaagctggtcagggaacaaatccactgcaagaacacgcgcagggtccagccaactaaggaagggggccagcgtttctttttcaaggatcacgtcgagtagaaagggatcgctgacctttgcggcttccgggaccagaggcagaacgtcatactccgtagtactggattgcgtttcatgataccagtggcttttgccggtgatgtggcgttgttccatgggcgctccttggtcgtaaaggaaatcgttatcctgacgcaaggcgggaaggggagaaagacggatcggcgataacaaatatcagaaaggtataacagagataacgggcggcagaacgccgcccatctttaccaacagaacgattatttcagttcgagttcgttcattgcagcaatgctgaaaccgccgtcaacgtggaccacttcaccggagataccggcagagagatcggagcacaggaatgccgcagagttacccacatcttcaatagtaacggtacggcgaatcggggtaacggcttcgcaatgagccagcattttgcggaagtctttgataccggaggccgccagagtacggatcggaccagcagagatggcgttaacacgcacaccttccggacccatcgcgttcgccatatagcgcacgttcgcttccagagacgcttttgccagacccataacgttgtagttcgggatagcgcgctcagcgccaaggtaggaaagggtcagcagggcagaacccggattcagcatggagcggcaagcttttgccattgcaacgaagctgtaggagctgatgtcgtgggcaattttgaagccttcacgggtaacggcgttaacatagtcaccatccagctgatcgccaggtgcaaaaccaatagagtgtacgaaaccgtcaaatttcggccaaactttccccagttcagcgaacatggtgtcgatgctggcatcttctgcaacatcgcactgcagaacgatgtcagaacccaattgagcggcaaattcttctacgcggcctttcagtttgtcgttctggtaggtgaatgccagttcagctccttcgcggtgcatcgcctgagcgataccgtaggcgatggatagtttgctggcaacaccggttaccagaatgcgcttaccggaaagaaaacccatagctttaatccttattgttgatgcttgttgtgcctgaaaatcaggcgattcgtcgttttagtaaacagtacgaacagataaacggttattataatcaacctggctgtgagtagctatagttgccaggtccgaccggagcaggctgcggcagggggggcgcttttcccctcaccctaaccctctccccagaggggcgaggggaccgtattgtgcaaatattgttaccccagcaacaaacaggctcatacagcccctaaccctttcatggcgatggctgggacggttcagaccttgccgaatattctccagcaccgtctccatgttttcaccacaacagctattcggctcggtctgccccctcgctctttcagggagagggactccggcggttcagttcctgcagaatattctccagcaccgtctcctcattacaatcaatctcgttattccagaaacgcagcacggtccagccctggctctcaagccagctagtgcgcctggaatcataggcaactgctaaatcatgctgcccaccatccagctcaacgactacacgcgcgctgcagcaagcaaaatcgagaatgtagctccccactggatgttgacggcgaaatttgaaatcactaaaacgtcggctgcgaagatatcgccagagctttcgttcctgcaaagtgagattgcgtcttaaatcacgcgcattacttttaattttatctatcacctcattctgacaagatttaatcttttgtcagaatgaggtgaataatctggaaggaggattcagaaaattagcgatctttacgccacgcatccgccgtcaatgcctcgccaaaatgaccggcaatcagccgtttggtgagttcatgcagcgggcttgccagcacatccgcggtgctgcctcgctcgacaacctcgccctgatgcatcaccagcacctggtcgctaatgtgcttcatcattccgatatgctgggtaacataaatatagctaatgccctgtttttcctgtaattccagcatcagattaatcaactggctacgcatgctcatatccagactagcgagggcttcatcggcaataatgacttttgggcgcaatatcagcgcgcgcgccagacccagacgctgtttttgtccgggtgccaacatatgcggatagtaactgacgtgatccggtagcagcccaaccatacgcatcgtttcaataatctgtttgcgacgctgttccggttccaggtcggtgttcaggcgcagtggaaaatccagaatttggctgatacgttgacggggattcaagctggtgctaggatcctgaaaaatcatgcgaatacgctgactgcggaaggaataatcgccaaaatgcagtggatgatcgtcaatcaataactcgccgctggtaggctctatcattcccgccagcatttttgccagcgtggatttaccgctaccattctcgccaataatcgccagtgtctggccttcacgtagcgtaaagctcaagggttttaccgcttctacggtctgacgacgaaaccagccggtccggtagcggaacgttttacttaaattacgcacttcaagcagcgtttcgatcatctcactctttctccatgttcagcgggaaatgacaggcatagagatgatttttcgcccccgtcaaacgtggcgtcacaatgcattctcgttgtgcatacgggcaacgtggccccagacgacaaccaatcggtaactgttccagcagtgggatagcgccgggcagcgtattgaggcgacttttatgcggcatcgcgctgccgaagtctggtatcgcgcggatcagcgcctgggtataaggatgatgtggcatcgtcaccaactccttactcggcgcggtttccactgtttgaccgcagtaaagcacgttaattttatccgcccattggctaagcatttgtaagtcatggctgataagcaaaatagtggtattgctgttttggttgagacgcgtcagcaggcgaaagatttgcgcctgggttgttggctccatactgttggtcggttcgtcagcaatcagcagacgcggttgattcgccagtgcaatggctatcatcactttctgacattcaccttcggtcaactcatagggaaaactgcgcatcgcatctttgtgatctttaatccccacgcggtgcagcagttcaatggcacggcgtttgcgccagccaaaacgctgccaccaacggcctttataggtccaggctgggatgttttgcatcaactggcggcccacacgttcactagggtcaagacagctctgcggttcctggaaaatcatgctcacgttatggccaaccagtttgcgccgttcgcgtgcggagagacgcagcaaatcgatatcatcaaaacgcatacggtcagcagtaacacgccagttatctttattcaccccacaaatcgctttcgcaatcaaactcttgccggaaccggattcaccaacaagaccgcggatttcaccttcggttaaggtcatacttacccggtcgacggctttaacccactcatcaccggttttaaattcaatggtcaggttacgaatatcgagtaatggcattattccacccccgcaataatcgcacgacgaacgccatcgccaaggaggttaaccaacaacacgctaatcataattgccgcacctggcagcatgacagtccacggggcgacataaatcagttccagcgcatcaccgagcatcgctccccattcagggctggggagttgtgcgccgagatcgagaaagcccagcgcggcgatatcgagaattgccatgctcagtgcgcgggtgatctcggtgaccagcccggcggtgatgtttggcatcacagcaaaccagagaatattcagcgtacttgcgccatccagacgggcggcgataacgtactctttttccagttcgtcatgcaccatgctgtaaatgctacgtaccatacgcggcagcaatgccagccagacagcaaacatagcgtgggacaaactcggtccggcaaacgctacaacgataattgccaacagcaggctagggatcgccagtaaggtatccagaatatggttaagcaccgcactgcggaggccgtgtgtcgccccggcgaaggtgcccagtaccaggccacagatcgtcgcggcaagcgtcaccacaaatgcgccacccacggttggcgcagctccgctcagtaaacggcttaaaacatcgcgtccgaggtcgtcagtccccaggaagaaagaaacttcgccatagcggctccaactcggcggcaataattgataaccgagaaattgctggtcgatgccgtaaggcgcaaaccagccgccaaaaatacacagtacagccagccccgcgcagccgtacaggccgaccatcgcagaggcgtcactataaaatttgcgccaggcggtacgcagcgtgcccggcgggcgcttttcgctgtatacgctatcgtaaggcataccattccttatgtttcagattatttatcgtaaggcataccattccttatgtttcagagggttagccatggcacccaaaatatcagaaatcacgttaacaataatgaccagactgccacacaccatcactccggcggaaatggctgcgtaatcctgctggcggatggcgttaattaaccagcgccctaaacccggccagctaaaaaccatttcggtgatcatcgccagcgtcagcatggtggaaaactgtaagcccaggcgaggaataaccggcggtaacgcgttatgcagaacgtggcgacgcaaaatagtaaagcggctcaaaccgcgggtcgccgccgcttttacatagttctggtcatacacttcgatagtgctgatacgcatcaggcggatcacttcagttgttggcgcaacgctcagggtgatcacgggcaatatcatatggcggattgcgctcatgatcatttcatcccgccatggactgtcgctaagccaggcatcaatcaacgcaaaaccggtaatcggtttcacttcgtagagcagatcgaaacgcccactaacgggcaaccaacctagcgtgagactacaaaacagcgtcaacagaagcgccagccagaacaccgggatactaaagcccagtaaggcgatggcgttgatcaagttatcctgccacttatggcgcgtaatcccggcaatcatccccacggggatgccaacaatcagcgcaaaaccgaaggcgaggatgcacagttccatcgtcgccgggaagacctcttttaactgttcggcaatcggttgaccgttaatgctggaaacaccaaaatcccagtggatcaggccgttaaaccagaacacccaggcattccacagactcgcgccttgtaacggcgcatgaggggtgaaatagctcaagctgaagccaacgaaggtcagcaggaacaaggtgacaatcaataacaaaatgcggcgtaaggtgaagataatcatggttttttcacctcatcctgtttctcgcgatacaccccagcaaaggaggcgttaccaaacgggctaagtaccagacctttgatatcgtaccgataggcctgcaaacgcaaactgctcgccagcggcaaaatgggcaattcctgcgccagaatactctgcgcttcgtcataggcttcaatacgcgccgccagctgctggctagagagcgccttacgcaatacgctgtcgaatttcggatcgcaccagtgggcgaggttggtctggctatgaattgccgcgcagctcagtaacggacggaagaaactgtccgggtcgttactgtccgtcgcccaaccggataacgtcagatcatggctcatatccatcaaccgcgcctcctgaaagcgaccttctaccggcacaatcaccacttttacgccaacctgcgccatatccgcctgaatcagttcggcagttttcagtggactggggttccacgcctggctacgtgtgggcacccacagtttcagcgttaaattttccagccccaagctcttcaactgttcgcggcttttcgccggattgtattcagtaattttagcctcgttgtcataggcccagctggcgcgcggtaaaatagaggccgccgtttcagccgtaccataatagatggattgcatcaggcgctggttattaatcgccagtgccagcgcatggcggacagcgggattatttagcggcggtttggcggtgttaaatgccagataggcgacgttcatcccaggacgcagcgttaaacgcaagcgcgggtcgtcacgcaaaatggatagctggctggcagcaggccaggccagaacgtcgcattccccggtcaggagtttgctcagacgtccggtgccgccggagcctaaatccaccactacctgcggcattaacggtttaccgcgccagaagtcatcatgacgttgtaggcgaataaattgcccggcgcggtattcgctcaactgatacggaccggtgccgaccggttgacggtcgagttgctcctggcgatcttctttctctaacttccgggcatattctgcgctcatgacgctagcataatgggttgcgaggtgccacaaaaaagaagcatccggctgggcgagtcggaactcaacggtatgattatccagtttgcggacgcttttcacgttatcggcaaattgcaggctgtcgaagtaggggaagttgctgccgttgacgttatgccacgggttgttgcggtcaaaaattcgctggaaggtaaacaccacatcgtcggcattcattttacgagtgggagtaaaccagtcggttttttgaaacggaacatcgcgacgcaggtggaagcgataggtcgcgccgttgtcgagtacttcccagctttcggcaagttccggcatcaggcgataggtatagggatcgacatccagcagtcgatcataaaactgggcggcaagggtatcgacaattaacccactgctcgctttggatgggttaaaggtgttgacttgcccgctgacgcaatagacaaaaccgctgtcgcggatatcagcatgcgggggagattcaggcgcggcgattgcctgaccactcacaagtccagcaatcaccaaaagagagcttaatacctggcgcataatattaagggattttatgtaaagaggctatcttactaatatttaatgacatttgccattaccgtttgtgttcaggggtcgtaatgagggccgtgtggttggtcgttgaacaggtgacgtcgccatctgttcaacattcgtacccgtgatttctctataactataactcacagaacaacttagcgaggagcagagcggtacgatcgtgagaaacccattaaagcacgctgcagtgcgtgtcattgttagccagatgcggcgtgaacgctttatccggacaacgatactgaccgatcgtctgcaattaaatcattactcattaccccattgattcaaaaactctgcgatctcatcaatgcgtacgggattaatccccgcttcagcagccatttcatgttgggcttcttcgctgatctcttcattgttcatcaaacgggtgagcagtaactggaagtagtgggccagcggtgtgcgttcagcctctgcgacaggctctgcgcattcggtcgcgtactcatcggcaatatcaaaatattttagcgggatatcgtggttcattatttgcccctggggttaatgcgctaagcataagggcggatgatagcactcgtgatccgggtcatacatctttttatagttaatggcgcggcgcgttaccctcaggcaggataatgcgccgcgcatccgactattacgtttcactcaccggcgttctgtcaccatcatacaacggcactttgcgatagcggcggatcagataccataaatatgcgccgcctaagctagcccataccagaccgagtgtcagactcgtactctcgaggttaacccacagcacacccaccgtcagcgcgccaaccagcggcatcagcaaatagtggaagtgatccttccagcttttattcattcctttacgccgccagaaatgattaaacacgctcagattcacgaaggtaaacgccaccagagcaccgaagttaattaacgctgtggcggtaactaaatcgaagaacagcgcgctcaacgcgacaatcccgaccataatgacgttgagtgccggagtccgccattttgggtgcacatagccaaacacgcgctccggaaacacattgtcacgccccatcacatacagcagacggctcacgctggcatgactagccaggccagaggctaacgtgttcacaaacgtggtgcagaggaaaatgctctggaagagcttgccgccgacgtacagcgcaatttcaggcagtgcggcatccggatctttaaagcggctgatatcgggaaagaacagctgcataaagaagctcgccgcgataaagataacgccaccgtagaccgccgtcaggaagatggctttcgggatcacgcgtgcggcgtccggcgtctcttcgctaagcgtggtcaccgcatcgaaaccgaggaaggagaaacagacaatcgtcgccccggtaataatcgggatcaggtgcgcgttctcgctgataaacggctgaagactccagacggtgccaacgccttctcctttatgcagtccctgaactaccaggaagataaacaccaccatgatggagatttgcaccagtacaaacagggtattgaagttagcgaccaggttgacgctcttcagattcgcggcggttaaaatggcgacgaaggttaccacccacacccacggcggcacttccgggaagagggcggagagatagattttcgccaacaagacgttaatcatcggcaaaaagagataatccagcaggctactccagccgaccataaatccgacgtgcgggttaatgctcttttgcgcgtaggtataggcgctaccggcctccggaaactggcgaaccagtttgccgtagctgatagcggtaaacagcacacccgccagcgccagcaaataggacgccggaacgtgaccgtcgctaatgccggagacaataccaaaagtatcaaatacggtcatcggcgtgagataggccagacccatcatcaccacctgccacaatttcagactttttcgcagacgggttttgccgggttgcgcagcaatattcagtggactattaatagccataattgctgcctcccctgcgtaataaggtttgcggtcgtgtcgacctgaaatcaaacctgtttagcaagggaagcaaagggggcggagtccagtcagtagcaggaggggcgcatacgcagcctccctcgccatgcggggatttaatcatcggcatcatctcatttcctcgtcacagtcttaatcgttaacggaagcccgttgccgcccgcgctccataacgcgacatccgggaaatgtctggattaccagcaaatgtcaggcctggctccgctcaggccgatgaaacaaccccgcaaggggtattacgcgtttttcaacatccactcaatttctgtttctgtgatgaggcgctcaaactgcaacagctcatcatttttacaggcgtgatagacatggcagaagcgttcgcctaaatagcggcgcaggtgatcattctcgataaactcacccagggcatcgctctggcgaatcggaaagggtaagccttcctgttccagcccgttgccttcgacttcttcctgcaacggcagctcgttatcaaggccatgcaaaataccggcaaaaatcgctgccatcaccagatatgggttggcatcggcacccgccacgcgatattccacgcggtgattatgacggtcgccgcacggaatacgcagggcgacggtgcggttgttatggccccagctcgcctgcgtcggcacatacattcccggctggaagcggcgatagctgttcacgtttggtgccagcaacgccatgctgctcggcatcaggtcaatcatcccggcgagcatctttttcagcagcgggctatcttcgccttccgcgtcagaaagcacgttctcgccacgattattttgcatactgatatggatatgcattccgctgcccgcgtgctcttcatacggcttcgccataaaagtggcgtgcatcttatgcttttctgccatcagacgcaccaggcgttttagtgccagcgcatcatcgcaggcttccagcacgttatcagtatggtaaaggttgatttcaaactgacccgggctggcctcagcgaccgcgccatctgccggaatcagctgtaactgcgccagttcatcaatatcattgagcacgtcggcgaagtggttgaggttatcaacggagtaaacctggctttgtgtattgcggtcatcggtgccaggcgcgcagggcggttgcagatacccttcagcgtcgcgctggcgatccagtaaatagaactccagctctaccgctacgaccgggaacaatccgcgctggcgcagctgctgccacaggcggttaagaacgttccgcggctcaacgtcaaagggagcgccatcttcatcgaccatggtcaggagcatctgaccgataaactctggatcggcggcagaaggagttaaggaaccgagaacaggaacacaggtacgatccggctcgcccatttcctgacccagacctgcttcttctactacgttgcccagaatatccattgcaaatacgctggccgggaaataacaccctttctcgagcttcttcaggctactaacaggaatacgctttccacggaagcaaccatttaaatcggtaagtaaaacatcaacatattgcgtattcgggtagcgctccaggtagcgtttcacttcctgcgtaaaggcgctaccccgcctctcttcactctgctgaacaaagttctctacttcaacgatattggtttccatgattcttcgcctttggtttgttttccgctcgttatcaaagcgtaaaatataatgaccaccattcgaatctgtatgcaaactaaatgtttgtcaaatgttaaattgagtttgcaaaaatgaaaacccactgctagattgaaaaaatattgaacataaaggtcatttaaagcgcagtaatggcgataatttagtccactttgtgagattgagcatggaaaatataatgaacaatccggttatcggtgtcgtaatgtgcaggaacaggcttaagggtcatgcgacccagactctgcaagaaaagtacctgaatgccatcatccatgcaggcggcttgcctattgcgctaccacatgcgctggcggaaccgagtttacttgaacaacttttgccgaaactcgatggcatttatcttcctggtagtcccagcaatgtgcagccgcacctatatggtgaaaacggcgatgagcctgacgccgatcccgggcgtgatcttctgagcatggcgataattaatgccgcactcgaaaggcgcatccccattttcgccatctgccggggtttacaagaactggtggtggcaaccggtggtagcttgcatcgcaagctgtgcgaacagcctgaattgctggaacatcgggaagatcccgaactgccggtggaacagcaatatgcaccgagccatgaagttcaggttgaagaggggggattactgtctgcgttgttacctgaatgtagcaacttttgggtaaactctctacatggacaaggggcgaaggtcgttagcccacggttgcgtgttgaagctcgcagcccggatggcttagttgaggcggttagcgtcatcaatcatccttttgcgctgggcgtacagtggcacccggaatggaacagtagcgagtacgcgcttagccgtatattgttcgagggctttatcaccgcttgtcagcaccatatcgctgaaaaacagcgactctgaccactacagtttaaggaaatgcaaatatgagtgatgagggactggcgccaggaaaacgcttgagcgaaatccgccagcagcaggggcttagtcaacgtcgtgccgccgaactctccgggctgactcacagtgctatcagtacgatagaacaagataaagtcagccctgccatcagtacgctgcaaaagctgctgaaggtgtatggtctgagtctcagcgaattcttttccgagccggaaaaacctgatgagccgcaggtcgtcattaatcaggacgacttaattgagatgggtagtcagggtgtgagtatgaagctggttcataacggtaacccgaatcgcacgctggcgatgatctttgaaacgtaccagccgggcacaaccactggggaaagaattaagcatcagggtgaggaaataggcactgtactggaaggtgaaattgttctgacgattaatggtcaggattaccacctcgtcgcggggcaaagttatgccattaataccggcatcccgcacagtttcagtaatacgagcgcaggtatttgccgaattatcagcgcccatacgcccaccacgttttaatctttttgttctgtaagccgggtaagcgcaatgcgcccggcaatctatacacaaaatcattcaagttgcatcaaggcggcaagtgagcgaatcccgatgagcttactcaggtaagtgattcgggggagcgaacgcagccaaggcagaggcggcttgaaggatgaagtgtatataaagaatgtcgccagaaataaacgggcatacggcccggggatctctgcgccctgacgttcacaaactgcatatatctgatagacgtgaaacaggagtcataatgaattttcatcatctggcttactggcaggataaagcgttaagtctcgccattgaaaaccgcttatttattaacggtgaatatactgctgcggcggaaaatgaaacctttgaaaccgttgatccggtcacccaggcaccgctggcgaaaattgcccgcggcaagagcgtcgatatcgaccgtgcgatgagcgcagcacgcggcgtatttgaacgcggcgactggagtctctcttctccggctaaacgtaaagcggtactgaataaactcgccgatttaatggaagcccacgccgaagagctggcactgctggaaactctcgacaccggcaaaccgattcgtcacagtctgcgtgatgatattcccggcgcggcgcgcgccattcgctggtacgccgaagcgatcgacaaagtgtatggcgaagtggcgaccaccagtagccatgagctggcgatgatcgtgcgtgaaccggtcggcgtgattgccgccatcgtgccgtggaacttcccgctgttgctgacttgctggaaactcggcccggcgctggcggcgggaaacagcgtgattctaaaaccgtctgaaaaaagtccgctcagtgcgattcgtctcgcggggctggcgaaagaagcaggcttgccggatggtgtgttgaacgtggtgacgggttttggtcatgaagccgggcaggcgctgagccgtcataacgatatcgacgccattgcctttaccggtagtacccgtaccgggaaacagctgctgaaagatgcgggcgacagcaacatgaaacgcgtctggctggaagcgggcggcaaaagcgccaacatcgttttcgctgactgcccggatttgcaacaggcggcaagcgccaccgcagcaggcattttctacaaccagggacaggtgtgcatcgccggaacgcgcctgttgctggaagagagcatcgccgatgaattcttagccctgttaaaacagcaggcgcaaaactggcagccgggccatccacttgatcccgcaaccaccatgggcaccttaatcgactgcgcccacgccgacagcgtccatagctttattcgggaaggcgaaagcaaagggcaactgttgttggatggccgtaacgccgggctggctgccgccatcggcccgaccatctttgtggatgtggacccgaatgcgtccttaagtcgcgaagagattttcggtccggtgctggtggtcacgcgtttcacaagtgaagaacaggcgctacagcttgccaacgacagccagtacggccttggcgcggcggtatggacgcgcgacctctcccgcgcgcaccgcatgagccgacgcctgaaagccggttccgtcttcgtcaataactacaacgacggcgatatgaccgtgccgtttggcggctataagcagagcggcaacggtcgcgacaaatccctgcatgcccttgaaaaattcactgaactgaaaaccatctggataagcctggaggcctgaaatgaccgaacataccagcagttactacgccgccagtgcgaataaatatgcaccattcgacacgctgaatgagagtatcacctgcgacgtttgcgtggttggcggcggctataccgggctctcctccgcgctgcatctggcggaagcgggctttgacgtagtggttctcgaagccagtcgcatcggctttggcgcaagcgggcgcaatggcggacagcttgtgaactcctacagccgcgacatcgacgtgatcgaaaaaagctacggcatggacaccgcccgtatgctcggcagcatgatgttcgaaggtggtgagatcatccgcgaacgtatcaaacgttatcagattgactgcgactaccgccccggcggcctgtttgtggcgatgaatgataaacagctcgccacacttgaagagcagaaagagaactgggaacgctacggcaataaacagctggaattgctggacgccaacgccattcgccgtgaagtagccagcgatcgctataccggtgcgctgctggatcacagcggtgggcatattcatccgctaaaccttgccattggcgaagcggacgccatccgcctcaacggcgggcgcgtgtatgaactttctgccgtgacgcagatccagcacaccacgccagccgttgtgcgaactgccaaaggtcaggtgacggcgaagtatgtgattgtcgccgggaatgcgtatctgggcgataaagtagagccggaactggcgaaacgcagcatgccgtgcggcacgcaggtgatcaccaccgaacggctgagcgaagatttagcccgtagcctgatcccgaaaaactactgtgtggaagactgtaactatctgcttgattactaccgtcttaccgccgacaaccgcctgctgtacggcggcggcgtggtctacggcgcgcgcgacccggatgacgttgagcgccttgtggtgccgaaactgctgaaaaccttcccgcagctgaagggcgtgaaaattgattaccgctggacgggcaacttcctgctgaccctgagccgtatgccgcagtttggtcgcctcgataccaacatctattacatgcagggctacagcggccacggcgtgacctgtactcatctagccggacgtttgattgccgaactgctgcgcggcgacgccgaacgtttcgatgccttcgccaatctgccgcattacccgttccccggcgggcgcacgctgcgtgtgccgtttaccgcgatgggcgcggcgtattacagcctgcgcgatcgtctgggcgtttaatttccgattaaccgtgaagagtcaaaaggtgtgaaacatgagcaacaatgaattccatcagcgtcgtctttctgccactccgcgcggggttggcgtgatgtgtaacttcttcgcccagagcgctgaaaacgccacgctgaaggatgttgagggcaacgagtacatcgatttcgccgcaggcattgcggtgctgaataccggacatcgccaccctgatctggtcgcggcggtggagcagcaactgcaacagtttacccacaccgcgtatcagattgtgccgtatgaaagctacgtcaccctggcggagaaaatcaacgcccttgccccggtgagcgggcaggccaaaaccgcgttcttcaccaccggtgcggaagcggtggaaaacgcggtgaaaattgctcgcgcccataccggacgccctggcgtgattgcgtttagcggcggctttcacggtcgtacgtatatgaccatggcgctgaccggaaaagttgcgccgtacaaaatcggcttcggcccgttccctggtagcgtgtatcacgtaccttatccgagtgatttacacggcattagtacacaggactccctcgacgccatcgaacgcttgtttaaaagtgacatcgaagcgaagcaggtggcggcgattattttcgaaccggtgcagggcgagggcggtttcaacgttgcgccaaaagagctggttgccgctattcgccgcctgtgcgacgagcacggtattgtgatgattgctgatgaagtgcaaagcggctttgcgcgtaccggtaagctgtttgccatggatcattacgccgataagccggatttaatgacgatggcgaaaagcctcgcgggcgggatgccgcttagcggcgtggtcggtaacgcgaatattatggacgcacccgcgccgggcgggcttggcggcacctacgccggtaacccgctggcggtggctgccgcgcacgcggtgctcaacattatcgacaaagaaagtctctgcgaacgcgcgaatcaactgggccagcgtctcaaaaacacgttgattgatgccaaagaaagcgttccggccattgctgcggtacgcggcctggggagcatgattgcggtagagtttaacgatccgcaaacgggcgagccgagtgcggcgattgcacagaaaatccagcaacgcgcgctggcgcaggggctgctcctgctgacctgtggcgcatacggcaacgtgattcgcttcctgtatccgctgaccatcccggatgcgcaattcgatgcggcaatgaaaattttgcaggatgcgctgagcgattaatagcccaacgcaataatgtctgatgcgctgcgcttatcaggcctgcaaacgacgtattgattatgtatgccgaataaagcattcacgccgcatccggcaagttgtattgctcaacttcgttaaatctggtgctttttcaacaacgcgcggaactgatgataagttaaccccagtaattcagccgcgcgcttctggttatatttcccttgttgcaaactgagttgcagcaactctttttcctgctgcatctgaaactcacgtaaatccagcggcagtgttggaaggctggtggtttcactaacggcgatagcgtcttcaggcggacgccgtttaaagggatcaataatgatgtcatcaagcggataatcgctggtgccgtggcgatacacactacgttccaccacgtttttcaattcacgaatatttcccggccaacgataattcagcaatgtttctctggcgcgctccgtaaaccccgggaacagaggcagcttgatttcccgacacatctggatggcaaagtattctgccatcaacattatgtcgctttcgcgctcgcgcagtggtggcagttgtacaacatcaaaagccagtcggtcgagcaggtcagcgcgaaaagtgccttcattgaccatcgccgggagatcggcattcgtcgcgcataccaaccgcacattcacctgcaatggttggctgccgccaacgcgctccagttcaccgtactcaatcacgcgcaataatttctcctgcaccatcatcggtgccgtagcgagttcatcaagaaatagcgtaccgccgtcggcacgttcaaatctccctggatgacgtttttgcgcaccggtaaacgcccccgcttcgtgaccaaacagttcggaatccagcagattttcatttaacgccgcgcagttaagggaaataaacggcccttgccaacgggaggagagataatgcaggcggctggcaatcagctctttaccggtgccgcgttcgccgatgatgagcaccggtttgtccagcggtgcgagatggctaacctgttccagcacttcgagaaagctgttcgcctcaccaagtaaattatctttgtattctgccatgatgaaattcgccacttgttagtgtaattcgctaactcatcctggcatgttgctgttgattcttcaatcagatctttataaatcaaaaagataaaaaattggcacgcaaattgtattaacagttcagcaggacaatcctgaacgcagaaatcaagaggacaacattatgggtattttttctcgctttgccgacatcgtgaatgccaacatcaacgctctgttagagaaagcggaagatccacagaaactggttcgtctgatgatccaggagatggaagatacactggttgaagtacgttctactagcgcgcgcgcgttggcagaaaagaaacagctgactcgccgtattgaacaagcgagcgcgcgtgaggttgaatggcaggaaaaagccgaactggcgctgctgaaagagagagaggatctggcacgtgcagcgttaattgaaaaacagaaactgaccgatctgattaagtccctggaacatgaagtgacgctggtggacgatacgctggcacgcatgaagaaagagattggcgagctggaaaacaaattgagcgaaacacgcgctcgccagcaggcattgatgttacgtcatcaggcggcaaacagcagccgcgatgtgcgtcgtcagctggacagtggcaaactggatgaagcaatggctcgtttcgaatctttcgaacgtcgtattgaccagatggaagcggaagcagaaagccacagcttcggtaaacaaaaaagcctggacgatcagtttgccgaactgaaagccgatgatgcaatcagcgaacaactggcacaattaaaagccaaaatgaagcaagacaatcaataataacatccaggcggcgtccgaacgcgccgccgctcatcgtctaaggagtacttatgagcgcgctatttctggctattccgttaaccatttttgtgctgtttgttttaccgatctggttatggctgcattacagcaatcgttctggtcgcagtgaattgagccaaagtgagcagcagcgattagcgcaactggctgatgaagcaaaacggatgcgcgaacgtattcaggcgctggaatctattcttgatgcagaacatccgaactggagggatcgctaatggcgggcattaatctcaataaaaaattatggcgtattccacagcagggcatggtccgcggcgtctgcgccgggattgccaactattttgatgtaccggtaaaactggtgcgtatcctggtggtgctgagcattttcttcggtctggcgctgtttaccctggttgcttacatcattttgagttttgcgcttgatccaatgccggacaacatggcctttggtgagcagctaccttccagcagcgaattgctggatgaagtcgaccgtgaactggcggcaagtgaaacgcgtttacgcgagatggaacgttatgtcacttccgatactttcacgttacgtagccgtttccgtcaactgtgaggaaagttatgaatactcgctggcaacaggccgggcaaaaggtaaagcctggtttcaaattagcaggcaagctggtacttcttaccgcactgcgctatggcccggcgggtgtggcgggctgggcgataaaaagtgttgctcgccgaccgctgaaaatgttgctggctgtggcgctggaaccgctgttaagtcgggctgctaataaactggcacagcgttataaaaggtgaggggagtttcgcaaaaattgttaaatctcaggcgtataatggatggcaattttcatccatagaaggacgcttacatgtttaaaaaaggcttacttgctctggcactggtgtttagtctgcccgttttcgccgctgaacactggatcgatgttcgtgttccagagcagtatcagcaagagcacgttcagggggccatcaatattcccctgaaggaagtgaaagagcgcattgccaccgccgttccggataaaaacgacaccgtgaaagtgtattgcaatgccggacgccagagtgggcaagcaaaagagatccttagcgagatgggatatacccacgttgagaacgccggtggcctgaaagacatcgcaatgccgaaggtcaaaggttaaaagaattcaccatgagcggcgcttatgcgccgtttttttttctgtcacaccttatttacatccccatagattatttgcgtcagctcacaaatacgctttttccctggtaaaaaatgatttcctgcgtgactaaaacccttgtgctcaattgacagtttattttctgcggagtagtctctcgtttcatgggaccgctaccacggaaaggcaacatgaaacagaaaattacggattacctggacgaaatctacggtggaacatttaccgcaactcatttacagaaacttgtaacgcgtcttgagagtgcgaaacgattaattacacagcgacgtaaaaaacactgggatgaaagtgatgtcgtgttaattacctatgccgatcaatttcacagcaatgatttaaaaccattacccacatttaatcagttttaccatcaatggctgcaaagcatttttagtcatgttcatttgttgccgttttatccatggagttctgatgatggctttagcgtaattgattatcatcaggtcgccagtgaagcgggggagtggcaggatattcagcaactcggtgaatgcagtcatttaatgtttgattttgtctgcaaccatatgagcgcaaaaagtgaatggtttaaaaactatttacaacagcatccaggttttgaagatttttttattgccgttgacccgcaaaccgatctcagcgccgtcactcgcccgcgtgcgttaccgttattaacgccattccagatgcgcgatcatagtacgcgccatttatggaccacctttagtgacgatcaaattgacctgaattaccgtagccctgaagtgttgctggcgatggtggatgttttactctgttaccttgcgaaaggtgctgagtatgtccgcctggatgccgttggctttatgtggaaagagccgggaacaagctgcatccatctggaaaaaacacatctgattatcaaactgttacggagcattattgataacgttgcgccaggtacagtgatcattaccgagaccaatgttccgcataaagacaacattgcttactttggcgcaggcgatgacgaagcacatatggtgtaccagttcagcctgccgccactggtgctgcatgcggtgcaaaaacagaacgttgaggcgctttgtgcgtgggcgcaaaacctgacactaccttccagcaacaccacctggtttaacttcctcgcctctcacgatggcatcgggctaaacccgctacggggcttgttgcctgaaagcgaaatattagagctggtcgaggcgttacagcaggaaggtgcattagtaaactggaaaaataatcccgacggtacacgcagtccgtatgaaataaatgtgacctatatggatgcgttaagccgccgtgagagtagcgatgaagaacgttgcgccaggtttatccttgcccatgcgattttgttaagtttccccggtgtgccagcgatatatattcaaagtattcttggcagccgtaatgattacgcaggtgtcgaaaaactcggatataaccgtgcgattaaccgtaaaaaatatcacagtaaagagataacccgagaactgaacgatgaagctacattaaggcatgcggtatatcatgagttgagccgtttaattacacttcgtcgcagccataacgagtttcatccggataataattttaccattgatacgattaatagttccgtaatgcgtattccaagaagtaacgctgatggtaattgtctgactggattgtttaatgtcagtaaaaatattcagcatgtaaatattactaatctgcatggtcgggatctgattagtgaagttgatatattgggtaatgaaataacgctgcgcccctggcaggttatgtggattaaataaaaaggaacatctcatgattaaaagtaaaatcgtgctgttaagtgcactggttagttgcgccctgattagtggctgtaaagaagaaaataaaacgaatgtatccatcgaatttatgcattctagcgtggagcaggagcgccaggccgttatcagtaaattgattgcccgttttgaaaaagaaaaccctggcatcaccgttaagcaagtgcccgtggaagaagatgcctataacactaaagtcattactcttagtcgtagcggtagcctgccggaagtgatcgaaaccagccatgactacgccaaagtgatggacaaagagcagcttatcgatcgcaaagcggttgccacagtcatcagcaacgttggtgaaggcgcgttttacgatggcgtactgcgtattgtgcgtaccgaagatggtagcgcatggaccggtgttcctgtcagcgcctggattggcggtatctggtatcgcaaagatgtgctggcaaaagcggggcttgaggagccgaaaaactggcaacagctgctggacgttgcacagaaactgaatgacccggcgaataaaaaatacggcattgcgctgcctacagcagaaagcgtgttgacggaacaatccttctcccagtttgcgttatccaaccaggctaacgtctttaacgccgaaggcaaaatcacccttgatacaccagagatgatgcaggcactgacctattaccgcgaccttactgccaacactatgccgggttctaacgacatcatggaagtgaaagacgcctttatgaacggcaccgcgccgatggcgatttactccacctatatccttccggctgtgattaaagaaggcgacccgaaaaacgtcggtttcgtggtgccaaccgagaaaaactctgcggtctacggcatgttgaccagcctgaccattaccgccgggcaaaagaccgaagagacggaagcagcagaaaaatttgtcacctttatggagcaggcagacaacattgccgactgggtgatgatgagcccaggtgctgcgctgccggtgaataaagcggtggtgactaccgccacctggaaagacaacgacgttattaaggcgctgggtgaactaccgaatcagctaatcggtgaactgccaaatattcaggtttttggcgcagtaggggataaaaactttacccgcatgggtgatgtgacgggttctggcgtggtgagtagtatggtgcataacgtcaccgtgggtaaagccgatctctctactacgctgcaagcgagccagaaaaaactggatgaactgatcgaacagcactaaacccaggacaggaatccgcaatgaacaggctttttagtggtcgttccgatatgccctttgcgctgctgcttctcgcgcccagcttattactgctgggcggtctggtggcgtggccgatggtgagcaatatcgaaatcagttttttacgtctgccgctcaatcccaacatcgagagtacgtttgttggggtgagcaactatgtgcgtatcctctccgatcccggcttctggcatagcctgtggatgacggtctggtataccgcgctggtggtggcgggcagcaccgtgctcgggctggcggtggcgatgtttttcaaccgcgagttccgcctgcgcaaaaccgcgcgtagcctggtgatcctctcctacgtaacgccgtccattagcctggtgttcgcctggaaatacatgttcaacaacggctacggcattgttaactacctcggcgtcgatcttctgcatctctatgagcaggcaccgctgtggttcgataatccgggcagtagctttgtgctggtggtgctgttcgccatctggcgctacttcccgtatgcctttatcagctttctggcgattttgcagaccatcgacaaaagcctgtacgaagcggcagagatggatggcgctaatgcctggcaacggtttcgtatcgtcacgctgcccgcaattatgccggtcctggcgacggtggtgacactgcgcaccatctggatgttctacatgttcgcggatgtttatttgctgacgaccaaggtcgatattctcggtgtatatctctacaaaaccgcctttgcctttaatgatttaggaaaagcggcggcgatcagcgtggtgctcttcatcattattttcgctgtcattctgctgaccaggaaacgggtgaacctcaatggcaacaaataaacgcacactcagtcgcatcggtttttactgcgggctggcgctgtttctcatcatcacgctgtttccattttttgtgatgctgatgaccagcttcaagggcgcgaaagaggcgatcagtctgcatcctacgctgctgccgcagcagtggacgctggagcattacgtcgacatttttaacccgatgattttcccgtttgtcgactacttccgtaacagtctggtggtgtctgtggttagttccgtggtggcggtattcctcggcattcttggggcttacgcgctttcccgcctgcgctttaaaggtcggatgaccatcaacgccagcttttacacggtgtatatgttctctggcattttgctggtggtgccgcttttcaaaatcatcaccgcgcttggcatttacgacactgagatggcgctgatcatcaccatggtgacgcaaactctgcccaccgccgtgtttatgctgaaaagctacttcgacaccatccccgatgagatcgaagaagcggcgatgatggatggcctcaaccgtctgcaaattatcttccgcatcaccgtgccgttggcgatgtccgggctgatatccgtgttcgtctactgctttatggtggcgtggaacgactatctgtttgcgagcattttcctctccagcgccagcaatttcaccttaccggtgggcctgaacgcgctgttcagtacgccagattacatctggggacggatgatggcggccagtctggtgaccgcattgccggtggtgattatgtatgcgcttagcgaacgttttattaagagtggtttgaccgccggtggcgtgaagggctaaagcggccagtttctttacaaggagttttaaatgaaaaagttagtagccacagcaccgcgtgttgctgcgctggttgagtatgaagatcgggcgattttagctaatgaagtgaagatccgcgtgcgtttcggcgcaccgaaacacggaacggaagtggtcgacttccgcgccgccagcccgtttattgatgaagactttaacggcgaatggcagatgttcactccgcgtccggcagatgcgccgcgcggcattgagtttggcaaattccagcttggcaacatggtggttggcgacattatcgagtgcggcagcgacgttaccgactacgcggtgggcgacagcgtatgcggctacggcccgctctccgagacggtcatcattaacgcagtgaataactacaagctgcgcaaaatgccgcaaggcagctcctggaaaaacgccgtctgctacgacccggcgcagtttgccatgagcggcgtgcgcgatgccaacgtgcgcgtaggggattttgtggtggtggtagggcttggcgcaatcggtcaaattgccatccaactggctaaacgcgctggcgcttctgtggtgattggcgtcgatcctatcgcccatcgctgtgatattgcccgtcgccacggcgcggatttctgccttaaccccatcggcactgatgtaggtaaagagatcaaaacgctgaccggcaagcagggtgccgatgtgattatcgaaaccagcggctacgccgacgcgctgcaaagcgcgctccgcggtctggcttatggcggcaccatctcctatgtcgcgtttgccaagccgtttgccgaaggttttaacctcggacgcgaagcgcatttcaataacgccaaaattgtcttctctcgcgcgtgcagcgaaccgaacccggattatccgcgctggagccgcaagcgtattgaagaaacctgttgggaactgctgatgaacggttatctcaattgcgaagatttaatcgacccggtggtgacctttgccaatagcccggaaagctatatgcagtatgtcgaccagcatccggaacagagcatcaaaatgggcgttacgttttaattcaaaggaatgaaaaaaatgaaaatcggcacacagaatcaggcgttctttccggaaaacattctggagaaatttcgttatatcaaagagatgggcttcgatggttttgagattgacggcaaactgctggttaacaacatcgaagaagtcaaagcggcgatcaaagaaaccggtttaccggtgaccaccgcctgcggtggctatgacggatggattggcgactttatcgaagagcgtcgtcttaatggcttaaagcagatcgagcgcattctcgaagcgctggcagaagtgggcggtaaaggcatcgtcgttccggctgcgtggggcatgtttaccttccgcttaccgccgatgaccagcccgcgtagcctggacggcgaccgcaaaatggtgagtgattccctgcgcgtactggaacaggtcgccgcgcgtaccggaaccgtggtgtatctcgaaccgttaaaccgctatcaggatcatatgatcaacaccctcgccgatgcccgccgttacatcgtcgaaaacgatcttaaacatgtacagattatcggcgatttctatcacatgaatatcgaagaagataacctggcgcaggcgctgcatgacaaccgcgacctgctcggtcatgtgcatattgcggataaccatcgctaccagccgggcagcggcaccctggatttccacgcgctgtttgaacagctgcgcgcggataactatcagggctatgtagtgtacgaagggcgtatccgggcggaagatcctgcccaggcgtaccgtgatagcttggcctggttgcgtacctgctaagaggtctttgtgaaaagtgcaatgacaagctctccgctgcgggtcgcgataataggcgcaggccaggtggcggataaggttcatgctagctactactgcacccgcaacgatctggaactggtggctgtctgtgacagccgcctttcccaggcgcaggcgctggcagaaaaatacgggaatgcatccgtgtgggacgatccgcaggccatgctgctggcggtgaaacctgatgtggttagcgtctgcagtcctaaccgttttcattacgaacataccctgatggcactggaagcgggctgccatgtgatgtgcgaaaaaccgcccgccatgacgccagaacaggcgcgggaaatgtgcgataccgcgcgcaaactgggcaaggtgctggcctacgactttcaccatcgttttgcgctcgatacgcaacagctgcgtgaacaggtgaccaacggcgttttgggagagatttacgttaccaccgcccgcgccctgcgtcgctgcggcgttcccggctggggtgtctttaccaataaagaactgcagggtggtggcccgctgatcgacatcggcattcatatgctggatgctgcgatgtatgtgctgggctttccggcggtgaaaagcgtgaatgcgcatagctttcaaaagatcggcacgcaaaagagctgtggtcaatttggtgagtgggatccggcaacttacagcgtcgaagatagcctgtttggcaccattgaatttcataacggcggcattctgtggctggaaacgagttttgcactcaacatccgcgaacagagcattatgaacgtcagcttttgtggtgataaagctggtgcgacgctgtttccagcacatatctacaccgataacaacggtgaattaatgacgctgatgcaacgggaaatagcagacgacaaccgccatttgcgcagcatggaagcctttatcaatcacgtacagggcaagcccgtgatgatagccgacgccgagcaggggtacatcatccagcaactggtggcggcgttgtatcaatccgcagaaacagggacgcgtgtggaattatgaccaggccagtaacgttaagtgaaccccatttcagccagcataccctgaacaagtatgcaagcctgatggcgcaggggaacggctatcttgggcttcgcgccagccatgaagaagattacacgcgccagacgcgagggatgtatctggcggggctgtatcatcgggcgggaaaaggtgaaatcaacgaactggtgaacctgcctgatgtcgtggggatggagattgccataaatggtgaggttttcagcttatcccacgaagcctggcagcgtgagcttgactttgccagtggcgaattacgccgcaatgttgtctggcgtaccagcaacggcagtggttacaccatcgccagccgtcgctttgttagcgcagaccaactgccgctcattgcgctggaaatcactattacgccactggacgccgacgcgagtgtgctgattagtacaggcattgacgccacgcaaaccaatcacggtcgccaacatctcgacgaaacccaggtgcgggtgtttggtcagcatctgatgcaggggagctacaccacccaggatggacgcagtgatgtggccatcagctgttgctgtaaggtgagcggtgatgtgcagcaatgctataccgccaaagagcgccgtttactgcaacataccagtgcgcagcttcatgcaggcgagacaatgacgttgcaaaaactggtgtggatcgactggcgggatgacaggcaagctgctttagacgagtggggcagcgcgagccttcgccagcttgaaatgtgcgcgcagcagagttacgaccaacttcttgcagcaagtacagaaaactggcgtcaatggtggcagaaacgtcgtatcacggtaaatggcggcgaagcgcacgatcagcaagcgttagattatgcgctttatcatctgcgcatcatgacgcctgcccacgacgagcgcagcagcattgcggcaaaaggcttaaccggcgaaggctacaaaggccacgttttctgggatacagaagtatttttgttaccgtttcatctgtttagcgatccgacggttgcccgaagtttactgcgttatcgctggcacaacttgccaggcgcgcaggagaaagcgcgacgcaacggctggcagggcgcgctatttccgtgggaaagcgcgcgcagcggcgaagaagagacgccggaatttgccgccattaacattcgcaccgggctgcggcaaaaagtggccagcgcgcaggcggaacatcatctggtggccgatatcgcctgggcggttattcaatactggcagaccacgggggatgaaagtttcattgcgcatgaaggcatggcgctacttctggagacggcaaagttctggattagccgcgcggtgagagttaacgatcgtctggaaattcatgatgttattgggccagacgaatataccgaacatgtcaataataatgcatacaccagctatatggcccgctacaacgttcaacaggcgctgaatattgcccgccagttcggctgtagcgacgatgcgtttatccatcgcgccgaaatgttcctcaaagagctatggatgccagaaattcagcccgacggcgttttgccgcaggatgatagctttatggctaagccggcgattaatctggcgaaatacaaagcggcggcggggaagcaaaccatactgctggattatagtcgcgcagaagtgaacgagatgcagatcctcaaacaagctgatgtggtgatgctcaattacatgctgccggagcagttcagtgcggcaagctgtcttgccaatctgcaattttatgaaccgcgcactattcacgacagcagtttaagtaaagcaatccacggcattgttgccgcacgctgtggcctgctgacccaaagttatcagttctggcgcgaggggactgaaatcgatcttggtgctgatccgcatagttgtgatgatggtatccatgctgccgcaactggcgctatctggctgggggcgattcagggttttgccggggtgagcgtgcgtgacggtgaattgcatctcaatccggcgttacctgagcagtggcaacagttgtctttccctctgttctggcagggctgcgaattacaggtcactcttgacgcgcagcgtattgcgattcgaacttctgcgcccgttagtctgcgtttgaacggtcagcttataaccgtggctgaagaatctgttttctgtttgggtgattttattttgcccttcaatgggaccgctaccaaacatcaggaggatgaatgaaactgcaaggggtaattttcgatctggatggtgtaatcaccgataccgcgcatctgcatttccaggcgtggcagcagattgccgctgaaattggcatcagcattgatgcgcagtttaacgaatccctaaaagggatcagccgcgatgagtctctgcggcgcattctgcaacacgggggcaaagagggcgactttaacagccaggagagggcgcaactggcgtatcgcaaaaatctgctctatgtccacagtctacgcgagttgacggtcaacgctgttctacccggcattcgctctttgctggcagatctccgtgcacagcagatcagcgttgggctggcttctgtctccctgaatgcgccgacgattttagcggcgctggagctgcgcgagtttttcaccttctgcgcggatgcttcccaacttaaaaacagcaaaccggacccggaaatctttctcgccgcctgtgcagggctgggcgtgccgccgcaggcatgtatcggcattgaagatgcgcaggcgggcattgacgccattaacgccagcggtatgcgcagcgtggggatcggcgcgggcttaaccggggcgcaattactgttgcctagtacggaaagtctcacctggccgcggttaagcgccttctggcaaaacgtataacaaaggaatcaacatggctcagcttagcttacaacatattcaaaaaatctacgataaccaggtgcatgtggtgaaggacttcaacctggaaattgccgataaagagttcatcgtgtttgtcggcccgagcggctgcggtaagagcaccaccctgcgcatgattgccgggcttgaggagatcagcggcggcgatctgttgatcgacggcaaacgaatgaatgacgttccagccaaagcacgcaatatagcgatggtgttccagaactacgcgttgtatccgcatatgacggtttacgacaacatggcgtttggtctgaagatgcaaaaaatcgccaaagaggtgattgatgagcgggtgaactgggcggcgcaaattctcggcctgcgtgagtacctgaaacgtaagccgggggcgctttccggcgggcaacgtcagcgagtggcgcttgggcgggcgattgtacgcgaagcgggcgtgtttttaatggatgaaccgctctctaaccttgatgccaagctgcgcgtgcaaatgcgcgcagagatcagcaagctgcatcagaaactgaacaccaccatgatctacgtgacccacgatcagaccgaagcgatgaccatggcgacgcggattgtgattatgaaagacgggattgttcagcaagtaggtgcgccgaaaaccgtttataaccaacccgcgaatatgtttgtttccggatttattggaagtccagcgatgaattttattcgcggcacgatcgatggcgataaattcgttacggaaacgcttaaattaaccattcccgaagagaaattagcggttctgaaaacacaggaaagtttgcataagcccatcgtgatgggaatacgaccggaagatattcatccggacgcgcaagaggaaaataacatttccgccaaaattagcgtggcagaattaaccggtgcggaatttatgctctacaccacggttgggggcacgagttaaacggttgggggcacgagttagtggtccgtgctggtgcgttaaatgattatcatgcaggagaaaatatcactattcattttgatatgacgaaatgtcatttctttgatgcagaaacggaaatagcaattcgctaaatacagggggaaggcattcccccaggataatacaaggaacaataatgaaaaagttattaccctgtaccgcactggtgatgtgtgcgggaatggcctgcgcacaggccgaggaaaggaacgactggcactttaatatcggcgcgatgtacgaaatagaaaacgtcgagggttatggcgaagatatggatgggctggcggagcctagtgtctattttaatgccgccaacgggccgtggagaattgctctggcctattatcaggaagggccggtagattatagcgcgggtaaacgtggaacgtggtttgatcgcccggagctggaggtgcattatcagttcctcgaaaacgatgatttcagtttcggcctgaccggcggtttccgtaattatggttatcactacgttgatgaaccgggtaaagacacggcgaatatgcagcgctggaaaatcgcgccagactgggatgtgaaactgactgacgatttacgtttcaacggttggttgagcatgtataaatttgccaacgatctgaacactaccggttacgctgatacccgtgtcgaaacggaaacaggtctgcaatataccttcaacgaaacggttgccttgcgagtgaactattatctcgagcgcggcttcaatatggacgacagtcgcaataacggtgagttttccacgcaagaaattcgcgcctatttgccgctgacgctcggcaaccacagcgtgacgccgtatacgcgcattgggctggatcgctggagtaactgggactggcaggatgatattgaacgtgaaggccatgattttaaccgtgtaggtttattttacggttatgatttccagaacggactttccgttagcctggaatacgcgtttgagtggcaggatcacgacgaaggcgacagtgataaattccattatgcaggtgtcggcgtaaattacagcttctgataatgggctaaattgccggatgcggcgcgagtactttatccgatctataaatgtaggccggataagatgcgctagcatcgcatctggcattcaggcaaggtagctggtatttatttcagcgtcatatgcgtggcaacggtaatattctgtggactcggttttccagaaattaagcggaataataactcgcagctttgttgacctaactcctgcgtcggaacatcgatgccgcccggtgcaggcgttaaaataaaactcagcgtttcattgctataacccaccaccgctaactgctgcggaatagcaatatttttctctgctgccgcacgataaatgctcattaatttcaggctgtcagtggcaaacaccgcctcaggcaacggactctggcttaataattgccgtgctgcttttaatgcagtttcatgggtataaccgccatcaacaatccattcatcacgcactgcaatattatgcgcagccaggctctgcttataaccattaacgcgatcaacgctaacatggacatcaagcggagcatgcaggcaggcaatattttgatgcccactttcaattaatgcatcggtcaacgcaatgctgtcgccaaaattatcggtatcgacagaataaacatgggcatattgaccttcaactttgccaatcaccaccaccggaatatcatatttatcgagttgggcaaaaaaactctcatccgctgggctactgagcataataatgcctttaatcattttctgcttaattttgctttcgcatttttgcagatcttctgccggattgtggctcgtttgtaatatcacgtcgaaaccttcttcttcagctttggcggtgatggcatgcaaaacttcagagaaaaacggattacccgccgtagttttggtgctacgggtagaaatcaccataatggcatcaaaaccgctagaggtcagcgcgcgggccagcttgtttggctgatactgtaattcttcaatggcccgtaacactttttcgcgcgcttccggggagatattagtttgcttattcagcacgcgacttacggtggatttacttacgcctgcaaccctggcaatatcataaatagtaggggacataggtcaggaactccgtccgaacgtgaatgctgcacatcttatggagttcgccggtcgatgacaacacgggcagttgataatcaatggcctggcccccacattcatatccttacgaatgattttttttctggtcttcagagcagcacaggacagcaatgaagcgacttaaaaatgaactcaatgcgctggtgaatcggggtgtcgacagacatctgcgcctcgctgtaaccggacttagccgcagcggcaaaacagcgtttatcaccgcgatggttaatcagttgcttaatattcacgccggagcacgtttgccgctgttaagtgcggtgcgtgaagagcgcctgctgggcgtgaaacgcattccccagcgtgactttggcattccgcgcttcacctatgacgaagggctggcgcagttatatggcgatccacccgcctggccaacgccaacgcgcggcgtcagtgaaatccgcctggcgctacgttttaaaagcaatgatagcctgctacgccactttaaggatacctccacgctgtatctggaaattgtggattatcccggcgaatggttgctcgacctgccgatgctggcgcaggactatttaagctggagccgccagatgacgggcttactcaatggtcagcgcggagaatggagcgcgaaatggcgaatgatgagcgaagggctggacccgctagcgcctgccgacgaaaaccggctggcggacattgccgccgcgtggaccgattatctccaccactgtaaagagcaggggctgcactttattcagcctgggcgctttgtcttgccgggagatatggcaggtgcgcccgcgctgcaattcttcccgtggccggatgtcgatacctggggcgagtccaaactggcgcaggccgataagcataccaatgccggaatgctgcgcgagcgctttaattattactgcgagaaggtggtgaaggggttctataagaatcattttctgcgctttgaccgccagattgtgctggtggattgcctgcaacctctcaacagtgggccacaggcatttaatgatatgcgtctggcactgacgcagctgatgcaaagttttcactacgggcagcgtaccctgttccggcgtttgtttagcccggttatcgataagctattgtttgctgccactaaagcggaccatgtgaccatcgatcagcacgctaatatggttagtttactgcaacaactgattcaggatgcctggcaaaatgcggcgttcgaagggatcagcatggactgcctggggctggcgagtgttcaggcgaccaccagcggcattattgatgttaacggtgagaaaatcccggcgctgcgtggtaatcgacttagcgatggcgcaccgctcactgtttatcctggcgaagttcccgcacgtttgcctggtcaggcgttctgggataagcaaggcttccagtttgaggcatttcgtccgcaggtgatggatgtcgacaaaccactaccgcatattcgtcttgatgctgcgctggaatttttaataggagataaattgcgatgaccgaaccgttaaaaccacgtattgatttcgacggtcctctggaggtcgatcagaatcctaaattcagggcgcagcagacctttgacgaaaatcaggcgcaaaattttgccccggccacgctcgacgaagcgcaggaagaagaggggcaagtcgaagcggtaatggacgcagcgttacgtccgaaacgcagcctgtggcgcaaaatggtgatgggagggctggctctgtttggcgcaagcgttgtcgggcagggtgtacagtggacaatgaatgcctggcaaacccaggactgggtggcgctgggtggatgtgccgctggggcattgattatcggcgctggcgtaggttctgtggtaacagagtggcggcgcttatggcgcttgcgacagcgcgcccatgaacgcgacgaagcgcgtgatttattgcatagccacggcacgggcaaaggccgcgcattttgcgaaaaactggcgcagcaggcgggtattgatcagagccatccggcgctgcaacgctggtatgccagtatccatgaaacgcaaaacgaccgtgaagtggtcagcctgtatgcgcatttggtccagccagttttagatgcccaggcgcggcgcgaaatcagccgtagcgcggcggaaagtacgttgatgattgcggtcagcccgctggcgttggtcgatatggcgtttatcgcctggcgcaatctgcgtttaattaatcgcatcgccacgctgtatggcattgaactggggtattacagccgtttgcgtctgtttaagctggtattgctgaatatcgcttttgccggagccagcgaactggtgcgcgaagtggggatggactggatgagccaagatctcgctgctcgtttgtctacccgcgcagctcaggggattggtgcaggacttctgacggcacgactcgggattaaagctatggagctttgccgcccgctgccgtggattgacgatgacaaacctcgcctcggggatttccgtcgtcagcttatcggtcaggtgaaagaaacgctgcaaaaaggcaaaacgcccagcgaaaaataatgcaatatcgggtgctgaccggatatctttacgccgaagtgcccgtttttccgtctttgtgtcaatgattgttgacagaaaccttcctgctatccaaatagtgtcatatcatcatattaattgttcttttttcaggtgaaggttcccatgcgtctggaagtcttttgtgaagaccgactcggtctgacccgcgaattactcgatctactcgtgctaagaggcattgatttacgcggtattgagattgatcccattgggcgaatctacctcaattttgctgaactggagtttgagagtttcagcagtctgatggccgaaatacgccgtattgcgggtgttaccgatgtgcgtactgtcccgtggatgccttccgaacgtgagcatctggcgttgagcgcgttactggaggcgttgcctgaacctgtgctctctgtcgatatgaaaagcaaagtggatatggcgaacccggcgagctgtcagctttttgggcaaaaattggatcgcctgcgcaaccataccgccgcacaattgattaacggctttaattttttacgttggctggaaagcgaaccgcaagatagccataacgagcatgtcgttattaatgggcagaatttcctgatggagattacgcctgtttatcttcaggatgaaaatgatcaacacgtcctgaccggtgcggtggtgatgttgcgaagtacgattcgtatgggccgccagttgcaaaatgtcgccgcccaggacgtcagcgccttcagtcaaattgtcgccgtcagcccgaaaatgaagcatgttgtcgaacaggcgcagaaactggcgatgctaagcgcgccgctgctgattacgggtgacacaggtacaggtaaagatctctttgcctacgcctgccatcaggcaagccccagagcgggcaaaccttacctggcgctgaactgtgcgtctataccggaagatgcggtcgagagtgaactgtttggtcatgctccggaagggaagaaaggattctttgagcaggcgaacggtggtagcgtgctgttggatgaaataggggaaatgagtccacggatgcaggcgaaattactgcgtttccttaatgatggcactttccgtcgggttggcgaagaccatgaggtgcatgtcgatgtgcgggtgatttgcgctacgcagaagaatctggtcgaactggtgcaaaaaggcatgttccgtgaagatctctattatcgtctgaacgtgttgacgctcaatctgccgccgctacgtgactgtccgcaggacatcatgccgttaactgagctgttcgtcgcccgctttgccgacgagcagggcgtgccgcgtccgaaactggccgctgacctgaatactgtacttacgcgttatgcgtggccgggaaatgtgcggcagttaaagaacgctatctatcgcgcactgacacaactggacggttatgagctgcgtccacaggatattttgttgccggattatgacgccgcaacggtagccgtgggcgaagatgcgatggaaggtagcctggacgaaatcaccagccgttttgaacgcagcgtattaacccagctttatcgcaattatcccagcacgcgcaaactggcaaaacgtctcggcgttagtcataccgcgattgccaataagttgcgggaatatggtctgagtcagaagaagaacgaagagtaagcgcgaatatgcctgatggtgcaacaccatcaggcatattaaattatgctttcagtacagccagagctgcttcgtaatccggctcggtggtgatttcatccaccagctggctgaaaatcacattgtcattttcgtcaataaccacaacggcacgcgctgccagacctttcagtgggccatcagcaattgccacaccgtaagcttgcagaaattcagcgttacggaaagtggagagggtgataacgttgttcagaccttctgcgccgcagaaacgagactgggcgaacggcagatcggcagagatacacagcacaacggtgttgtcgatctcagttgccagttggttaaacttacgtacacttgcggcgcaaacaccggtatcaatactcgggaaaatgttcagcactttgcgtttacccgcaaactgaccgagggtgacgtcagacagatcttttgccacgagagtaaaagtctgcgctttgctacccgcctgcgggatggaattggcgactgtaaccgggttgccctggaaatgaacggtttgactcatgattatctttcctgtttacatatagttaacgtcacacctagtttatgctaactgtcaataacacagcaaacgctattacagggtctccttacaacaactgtcaacgcagtttgtaattaaaagattaacccatatctggtgaatgaaacagtgatgaaccttctgccagatcaataaatcagaaaaatttaatgatatgacagaaggatagtgagttatgcggaaaaatcaggcaacgttacgcgtatgaccagcaagctgggccagcgcatcgttattttcgatggtgatgtatttacctttgactgccagcatgccgcttttctggaagcgacccagcagacggctgatggtttctaccgtcaggcccagatagttaccgatatcgccacgagtcatcgtcaggcggaattcacgaggggagaagccgcgttgggcaaaacgacgggacaggttgtagatgaatgcagccagacgttcctcggcatttttcttgctcaacagcaggatcatgtcctgatcgcctttgatttcaccgctcatcagacgcatcatctgctgacgcagattcggcattttaccggacaaatcgtccagcgtttcgaacgggatttcacataccatgctggtttccagcgcctgcgcgaagctcgggtgatggccgctgccgatggcgtcaaatcccaccaggtcgcctgctaaatggaaaccagtgatttgctcgtcgccttgctcagtgatggtataacttttaatcgtaccggagcggatggcataaaggcttttaagttcatcaccagccttaaacagcgtctggcctttctgaataggcttcttccgctcaatgatattatcaagctgatcaagctcatgttcgttgagtgtgaacgggatgcaaagctggctgatgctgcaatcctggcaatggatagcacaaccgccagactgaatgcgccgtataattcgcttttccgggatcataggtctgctcaagccgtaattgatatttgtcaattttaacatctttttagggagcaagtaagtctaagcaaaccttaacagcagagaattccgatattagatgtaaatatatgtctatctatttgaaaacccttaagttgttaagggtaactttacataaaagtgtgaacaagctggcacaaattgtttaatgtttacagcaaaagataaccttcatggcgcaataaccactcttttcgctgaactccgcctgcatatccggtcatggtgccgtttcggccaataacccgatggcaaggtacgacgatgctgatgggattgcttccgtttgccgcaccaacggcacgcgccgcgccaggacggcccaattgctcagccagttggccgtaatgcattacctgcccgcaggggatagtgcgtagtgttttccagacttcgcgctgaaatggcgtcccccccgtagcagtgggaagcgtatcaataatgctaagattaccggcaaaatattcacgaagcttgtcgcttaaaccgcctggattggtggcagaaatgcgctcatagccttctttgcgataatggatgtccagcagctgcaccatgcgttcgctgtactcttcccattcaaccgcccgcaggcgaaattgctcatcgcaaatcacccacagtggacccagtggcgtggcaattttttcttcaagtaatctcagcatccgttctctcttaagacaaacgtgggtaaatacccggacctatcggcagaccgacaagataccacgccagcacatcgcagccatactatgcagaaacaatgctgtcgatggctgcttttgcgtcagactgtgctttcgctgccatttccggaccgtatgcgatcccttcggcgaagacaaatttcacatcggtaatgccgataaagccgaggaacgtggacagatacggcgtcaccaggtccgttggtccatctttgtggatcccgccgcggctggtaataacgatggcttttttacccgttaccagaccttccggaccgttctcggtatagcggaaagtaacgcctgcgcgggcaaccaggtcaaaatagtttttcaactgagtcgagatgttgaagttatacatcggtgccgcaataacgataacgtcgtgggctttcagctcggcaatcaactcatcggaaagtgccagagcttcctgctgacgcggagtcagcggcgcatcgctcggacgcagagcgccaaccagttcgccatccagtaccggaatcggatttgcagccaggtcgcgaacggtgatttcatcagcggagtgcttttcgcgccattgttcaacaaaataatcggacaactgattagactgagagtaccctgccaggatgctggatttaagaactaataccttgctcatggtgtttccttatagatgtttgaatgggcgatgccccgttgcttgttgacactttattcacaatcctgccacagagatagcgcaataaatcgaagcctatgttcgaatttattgaacaacgcatagaaagccgcgatgtggtactctatatctatcatttaaaagaaaattaatcaggcagactactgcccactaacgttatgacagaacaacaaaaattgacctttacggccttgcagcagcggctggattcgctgatgctgcgtgacagactgcgtttttctcgccgtctgcacggcgtgaagaaggttaaaaatcctgatgcacaacaggccattttccaggagatggcgaaagagattgaccaggcggcagggaaagtcctgctgcgtgaagcggcacgaccggaaattacttatcctgacaatttaccggttagtcagaaaaaacaggacattctcgaagcgattcgtgatcaccaggtggtgatcgtcgccggggaaacgggttctggtaaaacgactcagttaccgaaaatctgtatggagctggggcgcgggattaaaggactgatcggccatacccagccgcgtcgtctggcggcaagaacagtggcgaaccgtattgcggaagagctgaaaacggagccgggcggttgcatcggttacaaagtgcgtttcagcgatcacgtaagtgataacacgatggtcaagctgatgaccgacggtatcctgctggcggagatccagcaagaccgcctgctgatgcagtacgacactatcattattgacgaagcgcacgaacgcagcctgaatatcgattttttgctcggctatttgaaagagttgctgccgcggcgtcctgacctaaaaatcattatcacttccgcgactatcgacccggaacgctttagccgccactttaataatgcgccgattattgaagtctccggtcggacctatccggtggaagtgcgctatcgcccgattgttgaagaagccgatgacaccgagcgcgatcagttgcaggcgatttttgacgccgtagacgaactgagtcaggaaagccatggcgacattctgatctttatgagcggcgagcgggaaatccgcgataccgccgatgcgctgaacaagctgaacttacgccataccgaaatcttgccgctttatgcgcggcttagcaacagcgaacaaaatagggtattccagagccacagcggacggcgcattgtgctggcgaccaacgtcgcggaaacgagcctgaccgtaccggggattaaatacgttatcgaccccggtacagcgcgtatcagccgctacagctatcgcaccaaagtgcagcgtttgccgattgagccgatttcccaggcgtctgccaatcagcgtaaaggccgctgtggtcgtgtgtccgaagggatctgtattcgtctctattccgaagacgatttcctcagccgcccggagtttaccgatccggagattctgcgtaccaacctggccagcgttattttgcagatgaccgcgctggggctgggcgatatcgctgcgttcccgtttgtcgaagcaccggataaacgcaatatccaggatggcgtgcgtctgctcgaagagctgggcgcgatcaccactgatgaacaggccagcgcctataaactgacgccgctcggtcgccagctcagccagttgcctgtcgacccacgtctggcgcgtatggtgctggaagcgcaaaaacatggctgcgtgcgtgaggcgatgattatcacgtccgcgctctccattcaggatccgcgcgaacgtccgatggacaaacagcaggcaagcgacgaaaaacatcgtcgcttccacgacaaagagtctgactttctcgcgtttgtgaatctgtggaattatcttggcgagcagcaaaaggcgctttcttccaacgccttccgtcgcctgtgtcgtaccgattatctcaactatctgcgcgtgcgcgaatggcaggatatctacacccagttgcgtcaggtggtgaaagaacttggcattccggttaacagcgaaccggcggagtatcgcgaaattcacattgcgttgctgaccggtttactttcccatatcggcatgaaagatgccgataaacaagaatataccggcgcacgtaacgcgcgtttctccatcttccccggttctggtttattcaaaaaaccgcctaaatgggtaatggtggcggaactggtagaaaccagccgcctgtgggggcgcattgctgcgcgtatcgacccggaatgggtggagccagttgctcagcatttgattaaacgcacctacagcgaaccgcactgggaacgggcgcagggcgcggtgatggcaacggaaaaagtcactgtttatggtttgccgattgttgccgcgcgcaaggtcaactacagccagatcgatccggcgttatgtcgtgaactctttattcgccacgcgctggtggaaggtgactggcagacgcgtcacgcattcttccgtgaaaacctgaaactacgggcggaagtagaagagctggaacacaaaagtcgtcgccgcgatattctggttgatgacgaaacgttgtttgagttctacgaccagcgcatcagccacgatgtaatctccgctcgccacttcgacagctggtggaaaaaagtcagccgcgaaacgcctgatttgctcaactttgaaaaaagcatgttgatcaaagagggcgcagaaaaaatcagcaagctggattacccgaacttctggcatcagggcaatctcaagctgcgtttgagctatcagtttgagcccggcgcggatgctgacggtgtgaccgtacatattccgctgccgttacttaaccaggttgaggaaagcgggtttgaatggcagatccccggtctgcgccgcgaactggtgattgctctgattaaaagcttgccgaaaccggtacgccgtaattttgtacccgcgccaaactatgccgaagcgtttttaggccgcgtcaaaccgctggagttaccgttgctcgacagccttgagcgcgagttacggcggatgaccggcgttaccgttgaccgcgaagactggcactgggatcaggtgcccgatcacctgaaaattaccttccgcgtggtggatgacaaaaacaagaagctaaaagaagggcgcagcctacaagatctgaaagatgcgctgaaaggcaaagtgcaggaaacgctatctgcggtggcggatgacggtatcgagcagagcggcttacatatctggagttttggtcagctgccggaaagctacgaacagaagcgtggcaactacaaagtgaaggcgtggccggcgctggtggatgagcgcgacagtgtggcgatcaaactgtttgataacccgctggagcaaaagcaggcaatgtggaacggtcttcgccgtctactgctgctgaatattccaagcccaatcaaatatttacatgaaaagttaccgaacaaagccaagctgggactgtactttaacccgtatggcaaagtgctggagctgatcgacgactgtatctcctgcggtgtggataaattgatcgacgccaatggtggcccggtctggacggaagaaggctttgctgcgctgcatgaaaaagtgcgtgccgaactgaacgacacggtggtggatattgcgaagcaggtcgagcaaatccttacggcagtgttcaatatcaacaaacgtctgaaagggcgggtggatatgaccatggcgctggggctttctgacattaaagcgcagatgggcgggttggtatatcgcggttttgtcactggtaacggcttcaaacggctgggcgacacgctgcgatatttgcaggcgattgaaaaacggctggaaaaactggcggttgatccacatcgcgaccgtgcgcagatgctgaaagtcgaaaacgtccagcaggcgtggcagcaatggatcaacaaactgccgcccgcacgtcgtgaggatgaagacgtgaaagagatccgttggatgatagaagagttgcgcgttagttacttcgctcaacaacttggtacgccttatccgattagtgataagcgtattttgcaggcgatggagcagattagcggttaaccctgctatttgcctgataaagaaaaaacccggtaagcatttagcgccgggttttttattaattctaaaacggtaagggtaaaaattcaggaattcagaaaaatacaattctctgctgcaagatgaataatgtttatctacagcatttccttaaaagatatgtcaggcttgcggagtggcggttaaggacatacgatttcctcctttcagagtgctccgcttctcactattatctcacgcagtattcttaagggaacgataaggaggaaccatgaacattaccccgtttccgacgcttagcccggcaactatagatgccataaatgttatcggacagtggctggcgcaggatgatttctccggtgaggtgccgtatcaggccgattgcgtgatccttgcaggcaatgcggttatgccgactatcgatgcggcatgtaagattgcccgcgatcagcaaattcctttactgattagtggtggtatcggtcacagcacaacttttttgtatagcgccatcgcacagcatccgcactacaacactatccgcaccactggcagagcagaagcgaccatcctggcggatatcgctcatcagttctggcacattccgcatgaaaaaatctggattgaagaccagagtacaaactgcggtgaaaacgcacgctttagcatcgcgctattgaatcaggccgtagaacgagttcatacggctatcgttgttcaggaccccaccatgcagcggcgcacgatggcgacgttccgccgtatgactggggacaatcccgatgcaccacgctggttaagttatcccggattcgttcctcagttaggaaataacgcagacagtgtaatctttattaatcagttacaaggattatggccagttgagcgttatctcagtctactcactggcgagctgccgcgtttacgcgatgatagcgatggctacggtccccgcgggcgagattttatcgttcacgttgattttccggcagaagtcatccatgcatggcaaacgctgaaacatgatgcggtgctcatcgaggcgatggaaagtcgcagcttacgttaaaaattgcccgtttgtgaaccacttgtttgcaaacgggcatgactcctgacttttatttctgccttttattccttttacacttgtttttatgaagcccttcacagaattgtcctttcacgattccgtctctctgatgattgatgttaattaacaatgtattcaccgaaaacaaacatataaatcacaggagtcgcccatgagtgtacccgttcaacatcctatgtatatcgatggacagtttgttacctggcgtggagacgcatggattgatgtggtaaaccctgctacagaggctgtcatttcccgcatacccgatggtcaggccgaggatgcccgtaaggcaatcgatgcagcagaacgtgcacaaccagaatgggaagcgttgcctgctattgaacgcgccagttggttgcgcaaaatctccgccgggatccgcgaacgcgccagtgaaatcagtgcgctgattgttgaagaagggggcaagatccagcagctggctgaagtcgaagtggcttttactgccgactatatcgattacatggcggagtgggcacggcgttacgagggcgagattattcaaagcgatcgtccaggagaaaatattcttttgtttaaacgtgcgcttggtgtgactaccggcattctgccgtggaacttcccgttcttcctcattgcccgcaaaatggctcccgctcttttgaccggtaataccatcgtcattaaacctagtgaatttacgccaaacaatgcgattgcattcgccaaaatcgtcgatgaaataggccttccgcgcggcgtgtttaaccttgtactggggcgtggtgaaaccgttgggcaagaactggcgggtaacccaaaggtcgcaatggtcagtatgacaggcagcgtctctgcaggtgagaagatcatggcgactgcggcgaaaaacatcaccaaagtgtgtctggaattggggggtaaagcaccagctatcgtaatggacgatgccgatcttgaactggcagtcaaagccatcgttgatagtcgcgtcattaatagtgggcaagtgtgtaactgtgcagaacgtgtttatgtacagaaaggcatttatgatcagttcgtcaatcggctgggtgaagcgatgcaggcggttcaatttggtaaccccgctgaacgcaacgacattgcgatggggccgttgattaacgccgcggcgctggaaagggtcgagcaaaaagtggcgcgcgcagtagaagaaggggcgagagtggcgttcggtggcaaagcggtagaggggaaaggatattattatccgccgacattgctgctggatgttcgccaggaaatgagcattatgcatgaggaaacctttggcccggtgctgccagttgtcgcatttgacacgctggaagatgctatcagtatggctaatgacagtgattacggcctgaccagtagtatctatacccaaaatctgaacgtcgcgatgaaagccattaaagggctgaagtttggtgaaacttacatcaaccgtgaaaacttcgaagctatgcaaggcttccacgccggatggcgtaaatccggtattggcggcgcagatggtaaacatggcttgcatgaatatctgcagacccaggtggtttatttacagtcttaatgagtgaaagaggcggaggttttttcctccgcctgtgcgcgtcagagtttagcgaatttttcgagggtgcgaataagctgtgtgacgaagccatattcgttatcgtaccaggcgaccgttttcaccagttgtaaatcgcccacggcggtaatttccgtttgcgtggcatcaaacaccgaaccgaaatggctgccaatgatatcggaagagactatttcttcatcggtataaccaaatgactcgttattggtggttgcttgtttaagtgcgttattcacctcttcggcagtcacttttttccgagaatcgataccagttcagtgaccgaacctgttttcaccggcacgcgttgcgcatgacctttcagtttgccgctcagttccgggatcaccagaccaatggcttttgccgcccccgtagtgtggggaatgatattttctgccgctgcgcgtgaagcacgtaaatctttaccacgcgggccatccaccagtgactgggtgccagtataggcatgaatggtcgtcatcgtgccgacttctatcccgaaactgtcatgcaaggctttggccatcggcgcaagacagttagtggtgcatgacgccacggaaacaatggtgtcgttgccatccagagtgtcgtcattgacgttataaacgatagttttcatttcaccggcaggggcggaaatcaacaccttcttcgcaccagcatcaagatgcgcctgcgatttctcggcggaggtataaaagccagtacattcgacaatgatttctgcacctttcgctttccacggaatatttttagcctctttttcggcgtaaaccgcgatacttttcccatcaacgataagtgaatcttccgtaaaatcaacgctccaggggaatggtccgtagtttgaatcatgtttcagcaggtaggcgagaatttatggggaagtgagatcattaatagcgacaacgtctatgttgcttttgacttcaagtaatcgacccaacaccagtcgaccgatacgaccaaaaccgttaataccaactttactcatggttttctcctgtcaggaacgttcggatgaaaattgatcctttccaagcttagaccaggatggcgggatgggcaatctccattctcacagtgaaacgtaacgtactgaaaacgggtgaacaatatttaatgaaattttgagaaaagcccgttatgttaacggaaaattatgttaaagcaggaaatgttatggaaaataaatatagtaggttacaaatcagcattcactggctggtctttttactggttatcgcagcgtattgcgcaatggagtttcgtggtttcttcccacgtagcgatcggccactcatcaacatgattcatgtttcctgtggcatcagtattctcgtgctgatggtcgttcgtcttttgttaaggctgaaatacccaaccccgccgattatacctaagccaaaaccgatgatgacgggactggcgcatttgggacatttggtgatttatctcctgtttattgcgctgccagtgattggtttggtgatgatgtataaccggggcaacccgtggtttgcgtttggtttgacgatgccttacgctagtgaggccaatttcgaacgggtagatagcttaaagagctggcatgaaacgctggcgaatctgggatattttgtcatcgggttgcacgctgcggctgcactggcacaccactatttctggaaggacaacacacttctacgcatgatgccgcgtaaacgttcctgaaggatatttaaagaaaacgcctgtactaaaaccgacccgtggtacaggcgaagaatacgggtctacatcggaagcgcctattatatttatttgtatgataaataaaaccataatccttgcccatacgtccatctggcttatttttaatcaattcacccgatctttgatctcatcaacggtatcaaaataaaccagcgtataacgttcaaatcgaacataagattcgataaaccatggaggttatatgaaaaaactggcacttattttgtttatgggaacgcttgtttccttttatgccgatgccgggcgcaaaccctgttctggtagcaaaggggggatcagtcactgtacggcaggcggcaaatttgtctgtaatgatggttctattagtgcaagcaaaaaaacatgcactaactgaagtgtaaaaggggtgccatgagaaaatgaatctgctagtcaaatgcgcggggaaaatccccgcgcttgcccttacctggacgtgcaggccatgagcgcagcaacctccttatcaccgtcccggaaccgcagttcgtagagcgtttgtcgggtcaggagtgtgaatgtcagaatcgtaatgcagataatgagcagacacaccaccagagggttgtgcttcatagcctttctccttgccggatggcgggtaagaggctaagatctgaattgctaggttcattcgttggcctcggttgatagaaatatcggtcggggccttcgtctttctgattcccggttagcctgaaaacagaaagtctcaggcacccgcaggcatcctatgaggtttccttagggacgaaaataatcacttcacgaaattgcgtgctgttttccagaatttttcgtcattcgggttagccagtttagccattcgttactctcttcattccaatagcattaattttctatgcaataattgttgtaaaaatgtgacgcaaagaggtttttggtcataagtaattaccgtcaagtgccgatgactttctatcaggagtaaacctggacgagagacaacggtaatgaatacaactcccagtcagcgattaggttttttgcatcacatcaggttggttccgttatttgcctgcattctaggcggtatcttagttctattcgcattaagtagtgccctggctggctatttcctctggcaggccgatcgcgatcagcgtgatgttactgcggagattgagattcggaccgggttagcgaacagtagtgattttttgcgtagtgcccggatcaatatgattcaggccggggctgcgagtcgtattgcggaaatggaagcaatgaagcgaaatattgcgcaagccgaaagcgagattaaacagagccagcaaggttatcgtgcttatcagaatcgaccggtgaaaacacctgctgatgaagccctcgacactgaattaaatcaacgctttcaggcttatatcacgggtatgcaacctatgttgaaatatgccaaaaatggcatgtttgaagcgattatcaatcatgaaagtgagcagatccgaccgctggataatgcttataccgatattttgaacaaagccgttaagatacgtagcaccagagccaaccaactggcggaactggcccatcagcgcacccgcctgggtgggatgttcatgattggcgcgtttgtgcttgccctggtcatgacgctgataacatttatggtgctacgtcggatcgtcattcgtccactgcaacatgccgcacaacggattgaaaaaatcgccagtggcgatctgacgatgaatgatgaaccggcgggtcgtaatgaaatcggtcgcttaagtcgtcatttacagcaaatgcagcatagtctggggatgacagtagggactgttcgacagggcgcggaagagatttatcgtggcaccagcgaaattagtgctggcaatgcggacctgagttctcgcaccgaagaacaagcggcggctatcgaacaaactgccgccagcatggagcaactcactgcgacggtgaaacagaatgcggataacgcgcatcatgccagcaaactggcgcaagaggcttctattaaagccagcgatggcgggcagacggtttccggtgtagtaaaaacgatgggcgctatctccacgagtagcaagaaaatttctgagatcaccgccgtcatcaacagtattgctttccagacgaatattctggcactgaatgctgccgttgaagccgcgcgagcgggtgagcaagggcgtggatttgccgttgtcgccagcgaagtacggacactcgcaagtcgcagcgctcaggcggcgaaagagattgaaggcttgatcagtgaaagtgtcaggttaattgacctggggagcgatgaggtggcaacggccgggaaaaccatgagcactattgttgatgccgtcgcgagtgtcacacatatcatgcaggaaatcgccgccgccagcgatgaacaaagtagaggcataacgcaggttagccaggcgatttctgaaatggataaggtgacgcaacagaatgcttctctggtagaagaggccagtgcggcggcggtgtcccttgaagaacaggcggcacgattaactgaggcggtggatgtattccgtctgcacaaacattctgtgagcgcagaacctcgcggagcgggtgaaccagttagtttcgctacggtgtgaaaatgttcaaggagggatcgacagatcccttcacctttcagaacggcatactttttcgaatagcgttaatcatcaactggcaaccagaagagaacgtcgcatctacgcgggtcagtattccaatcggttcgcctgcaccatgtcccggaacaggcagggccaccagcgtggcatgacgcaggtcgtcttttacagcgccagaagggacaaaccacacgtaatcgtattcaaccgtaagttgacgagataggctagcagacagcgtttcgatacaaccgctaggaattttacagccctggctctgcactaatgcatcactatgctggcgtggcgcagtgccttctggacttacaacgaccggccattccagcacccggcttagcgttacgttctcctgaagtagcgggtgattagggcggacaaccagcttcaagctttcaagaaacagcagttcgtaattaagcccggtcatcagttcaggatcactcatccgaccaatgccgatatcgatttccccggtttttaaacccgccagaatcatagggttactcattgtcgcaacttgcaaggtcgtctctttttgttgctgatgaaactgacctataacgctaggtaatatccccagtgccgcagtaggtagtgcaccaaccctgacgacatcattattaagaccttctttacgatgaaggctccgtccggcagtgttgatggcgtcaagaactctgactgcatgcgttaaaaattgttcgccgggtaaggtaagttgcgccccctgacgaccacgctcaaacaagcgagcgccagtcagctgctccagttcattcaatgtcttagagagcgcaggttgactcaaattaagggtttcagccgcgcgccccaaagttccttgttgtgcgacagctacgaatgtatgaaggtggcgcaaacggatgcgctgactaaacagactatttttttccataagcgatgttaaaaacgaagcggtgtcgctgacaagtgaagttgtttgattatgataacttgattgcaaaatattattaacaattaaagcaattatgttacagcaaaatggataatattgatgttttcgcggcgagatcacagtttgtaaattcttcccgcaagagtgaatgcggttacctacactccagattactgaccactggaggcagacactatggcgaacagcatcacggcggatgagattcgggaacagtttagccaggcaatgagtgccatgtaccagcaagaagttccgcaatatggcacgctgctggaactggtagctgatgtgaatctggctgtgctggaaaacaatcctcaactgcacgaaaaaatggtaaatgcagacgagctggcgcgactgaatgttgaacgtcatggggcgattcgcgttgggactgcacaagagcttgctactcttcggcggatgtttgccattatggggatgtacccggtgagctattacgatctcagccaggcaggggtgccggtacatagcacagcatttcggcccattgatgatgcttctctggcgcgtaatcccttccgcgtttttacctccttactccgccttgagcttatcgagaacgaaattttgcgccagaaagcggcggagattctgcgtcagcgcgatatcttcaccccacgttgtcgacaactgttagaggaatatgagcagcagggcggctttaacgaaacacaggcacaggagtttgtgcaggaagccctggaaacgtttcgctggcaccagagtgcaacggtagatgaagaaacctatcgcgcattgcacaacgaacatcggttgattgctgatgtggtctgttttcctggatgccatatcaaccacctgacgccacgtacgctggatattgaccgggtgcagagcatgatgcctgaatgcggaattgaacccaaaattctcatcgaggggccgccgcgccgcgaggtaccgattttactacgccagaccagctttaaagcactggaagagacggtgttgtttgcggggcagaaacagggcacgcataccgcgcgctttggtgaaattgagcagcgtggcgtggcattaacgccgaaagggcgacaactgtatgatgatcttctgcgtaacgctggaaccgggcaggataatctcactcaccaaatgcatttacaggaaaccttccgcacttttcctgacagtgagtttttaatgcgtcagcaagggttggcatggttccggtaccgtctgacgcctagcggtgaggcgcatcgtcaggcgattcatcctggagacgatccacagcccttaattgaacgtggttgggtagtggcgcaacccatcacctatgaagatttcttgcccgttagcgcggcggggatcttccagagtaatctgggtaatgaaacgcagacacgcagtcacggtaatgccagtcgcgaagcatttgagcaggcgttgggttgtccggttttggatgagttccagctttaccaggaagcggaagaacgcagtaaacgtcgctgtggtttgctttaaaatctgaccatccgcctttgcaaaaatttgcctgattttacaaacgaatcaggctcatcccatcgacataaaaaaaatgccgatttatgcatattctctcagttcaacaattggattattaataaatattgtctagagtgagcggtcataaataagcactttcttgccgctgaaaacgaccagcgcgggaccattcacaacaccagaaggactcactttcaggtatggatcgtagacgatttattaaaggttcaatggctatggccgccgtgtgcggtaccagcggcattgcttctcttttttctcaggcggcattcgcggcagattctgatattgccgacgggcaaacccagcgttttgacttctccattctacagagtatggcgcacgacttagcgcaaacagcgtggcgtggtgcgcctcgtccgttacctgacacgctggcgacaatgacgccgcaggcttataacagtattcaatacgacgccgaaaaaagcctctggcataacgttgagaaccgtcaactggacgctcagttcttccatatgggaatgggattccgtcgccgcgttcgtatgttttctgtagatccagcaacacatctggcgcgtgaaattcactttcgcccggagttgttcaaatacaacgatgcaggtgttgatacaaaacaattagaagggcaaagcgatctcggctttgccggttttcgcgtgtttaaagcccccgaactggcgcgccgtgatgtagtaagttttctcggcgcgagttatttccgcgccgttgatgatacatatcaatacggtttgagcgcccgcggcctggcgatcgacacttacaccgacagtaaagaagagttccccgactttaccgccttctggtttgatacggtaaaaccgggggcaactacctttaccgtttatgcgttgctcgatagcgccagcattactggtgcctataagttcactatccattgtgagaaaagtcaggtgattatggatgtggaaaatcacctgtatgcgcgcaaagacattaaacagctgggcattgcgccgatgaccagtatgttcagctgcggtactaatgaacgtcggatgtgcgatacaattcatccgcaaattcatgactctgatcgtctgtccatgtggcggggcaacggcgagtggatttgccgtccgctgaataatccgcaaaaattgcagttcaatgcttacaccgacaacaacccgaaagggtttggtttattgcaactggatcgtgacttctcccattatcaggacattatgggctggtataacaaacgcccaagtctgtgggtggaaccgcgtaacaagtggggtaagggcaccatcggcctgatggaaatcccaacaacgggcgaaacgctggataacattgtctgcttctggcagccagaaaaagctgtaaaagcaggtgatgagtttgcattccagtatcgtctgtactggagtgcgcaaccgcctgttcattgcccattagcgcgcgttatggcgacgcgtaccggcatgggcggtttcagcgaaggttgggcgccaggtgaacactatcccgaaaaatgggcgcgtcgttttgccgtcgatttcgttggtggtgatctgaaagctgccgcgccaaaaggcattgagccggtgattacgctttccagtggggaagcgaagcaaatcgaaattctctatattgaacccatcgatggttatcgtattcagtttgactggtatccgactagcgactccactgatccggtcgatatgcggatgtatctacgttgtcagggggacgctatcagtgaaacatggctgtatcagtatttcccgccagcgccggataaacgtcagtatgttgacgaccgcgtgatgagttaatcgttttttcttcggcaccttcttcgggaggtgccgtctggttaaacacgatcccgctcgcatttttccctaagttaaatgagtaatctgatggtgtgtatttcagatacaccttgtcagccactaacagggagtgcgtatgtttccagaataccgagatttaatatcccgtctgaaaaacgaaaatcctcgctttatgtccttgttcgataaacacaataaacttgatcatgaaattgccagaaaggaaggttccgacggtcgagggtacaatgcggaagtggtccgcatgaaaaaacaaaagctacagttaaaagatgagatgctcaaaatcctgcagcaggagagcgtcaaagaggtgtaaactttcctaagccgccagccaggcggcttttttaacaactgcatggattgactggagataagatgactgaaacgataaaagtaagcgaaagtcttgaattacatgctgttgcagaaaatcacgtcaaacctctttatcagttaatctgtaaaaataaaacctggttacagcagagcctaaactggccgcagtttgttcaaagtgaagaggacacgcgaaaaacggtgcagggtaatgtgatgttgcatcaacgcggctatgccaaaatgttcatgattttcaaagaagatgaacttatcggcgttatcagctttaatcgtattgaaccactgaataaaaccgctgaaatgggctactggctggacgaatctcatcaggggcaggggatcatttctcaggcgctgcaggcattgattcatcattacgcccagtctggtgaacttagacgcttcgtgatcaaatgtcgggtggacaatccgcaaagcaaccaggtcgctttgcgcaatggttttatccttgaaggttgcctgaaacaggctgagttcctgaatgatgcctatgatgatgtgaacttatacgcgcgtattatcgatagtcaataatcacaataaccctgccagcggcgttcgcgtaatgcgctcctcgccgttaatgacttttggaccacggacatgaaccgtgtcgccatcaaaggcttcaacgacggcgtggtcggttaactccacatggttttcaattatcaccgcacctgtaatacggctctcaccttgtatgacaacgtgctcgtcgagcagaatcggtccgccacgtaccacggcatttccgccaaccaagacatgatgttttaacacacaattaccttccacaatggcatattccgccacctggctactgtaatgaatcgtcggaatggcatcttcttctatgccagctttcacctgcgcgtgaccgtagactttagcgcaatcgcatagccagacattgttctcttcattaccttcaatactggcaaaatcaaaaacttcggcgcgatgttcaataaaagcataccggacgacggcatcgccataaatttgtgcctggtggacaatacggctggcgctaacccttgcgcgatcataaatttggagcaggagttgatggtcgggcgttaagccttgtgcggcgacgatcatagaatgttgatcaattaaggcgtgaccaaatattctacattgcccgtaaactaaactgtcatgaatggtgacgctgtcacttatatatgcaccctggctgatttcactattatcgatccagacgttatccgttgcgtaaacctctccccacagcacgctggtgccggtgatacgcgtattaccggaaatcaccgctccgccgaacgcaatagcattctggtcgtaaatccagcaatttccttcttgtgctaacaccgtttcgcgatcgatccagccgccagcggttcctgctatcacatcgttaaaatcgctaatggcgataatctgccgtaataacacattttttttagtgccatcttcctgataactaaaggctcgctgttcttcacttagacgatatttgcgcatagcgttttcccacaggtgacttactataaccgtagcaaattctgcggctctggctatgctcgagaaaattccataaaatgcatttcaaatatactttataaattaaacaaaatgagtaagaagatgcagagcgataaagtgctcaatttgccggcaggctactttggtattgtgttggggacgatagggatgggatttgcctggcgctatgccagccaggtttggcaggtcagccactggttaggggatgggctggtgattctggcgatgatcatctggggattattgactagcgcatttattgcccgactcatacgctttccgcatagcgtgctggcggaagttcgccatccagtgctgagcagttttgtgagtttgtttccggcaacgacgatgctggtggcgattggttttgttccgtggtttcgcccactggcggtgtgcctgttcagttttggtgtcgtggttcagttggcttatgccgcctggcaaactgcgggattatggcgcggatctcaccctgaagaagctaccacgcctggactgtatctgccgacagttgccaacaactttatcagcgcaatggcctgtggtgcgttgggctacaccgacgccggtctggtgtttttaggcgcaggcgttttcagttggctaagccttgaaccggtgatcttgcagcgtctgcgcagtagcggagaattacccacggcactgcggacaagtctcggcattcagctcgctcctgcgctggtggcttgtagtgcctggctgagcgtcaacggcggcgagggtgacacgctggcgaaaatgcttttcggttatggactgctgcaactgctgtttatgctacgtctgatgccatggtatctctcccagccatttaatgctagtttctggagtttcagcttcggcgtatctgcactggcaaccaccggtttgcatctggggagtggcagcgataatggatttttccatacgctggcggtgccgctgtttatctttaccaattttattattgcaatactgctcatccgtacttttgcgcttctgatgcagggaaaattgttagtcagaaccgagcgcgccgttttaatgaaagcagaggacaaagaatgatcattcgtgacgaaaactattttactgataaatatgaattaacccgcacacactctgaagtactggaagcggtgaaagtggttaaaccgggtaaaacgctggatctgggctgtggcaatggtcgtaacagtctttacctggcagccaatggttatgatgttgacgcatgggataaaaatgccatgagtatcgccaacgtcgagcgcattaaatccattgaaaatctggataatttacacacccgagtcgttgatctgaataacctcacatttgatagacagtacgattttattcttagcactgtggtgctgatgttccttgaggctaaaaccatccccgggttgattgccaatatgcaacgttgcactaaacctggtggttacaacctgattgtggcggcgatggataccgctgattatccatgtaccgtcggcttcccgtttgccttcaaagagggagaattacgtcgatattacgaaggctgggagagggtgaaatacaatgaagacgtcggcgagctgcaccgcaccgacgccaacggtaatcgtattaaactgcgtttcgccacgatgctggcacgtaaaaaatgacccggtaagcacaaaacgcgtgaaaattccccacgctgagatgatttactgttcttcttttcggtaagcatattttttatcgaagggatgtgaaattaatcacagtagtcgaagtttttagcagcttaacttactgaaatttaagtactgatgattgacttagcccctttttcggcattgactatgtcgtctgaaaaggggctgaaaaatttattttcaccaacactttttttgccacaacacgaagcggcgctttttgctataacttagaaagtaatataatcatctcaggaaactattcatgcgtaccacaagttttgcgaaagttgcagctttatgcggcttattggctctgtctggttgtgcatctaaaatcacccagccagataaatattctggttttttaaacaattactctgatttaaaagaaacaaccagcgctacaggtaaacctgttttacgttgggtagacccgagttttgatcaaagcaaatatgacagcatcgtctggaacccaatcacttattatccggtaccgaaaccgagcacccaggtagggcagaaagttctggataaaattttgaactataccaacaccgaaatgaaagaagcgatagcgcagcgtaaaccactggttaccaccgctgggccgcgtagtctgattttccgtggggccattaccggtgtagataccagcaaagaagggctgcaattctatgaagtggttcctgttgcattagtggttgcggggacgcaaatggctacaggccaccgtaccatggatactcgcctctattttgaaggtgagctgattgatgcagcgactaataaaccggttatcaaagtcgttcgtcagggcgaaggtaaagacctgaataacgaaagtacgccaatggctttcgaaaatattaaacaagttattgatgacatggcgaccgatgccaccatgtttgacgttaacaaaaagtaattccagacgcgccatcgttagatggcgctttttatccggtgcgccgtaaaaccccatccttcagggcggggatataaggcgcggttttccacctgaccaggtgtttgctgttgttcaatgtattggcggatgacggatattggcgcacctccgcagctactggcaaaatagccaggactccacaaaacgcctttgtagtaatacctgaatgcaatatctggtcgatctcgtcgcagtcacctacccgatacgcctttgaggctgtttaccagactggatatcgccagtttgggaggatagttaattaacaaatggacgtgatctggttcgccatccatttcaaccagttcagcttcaaaatcagcacatacatttgaaaagtaagtgcgtagtttttctgtcgcgtcatggtcaaaaatctggcgtcggtatctggtgacaaagagcaggtgaacatgcatcaggaaaacacaatgccttccacgccggatatcggtttcttttttcacagaccaaagtatcatttgacctgtgaaacgattacaggcatttaaattccagttaagacccggtggtcaacaggagtgtgaaatgaggcgcttcgcaggcgcatgtcgtttcgttttcaatcgtgctctggcacgtcagaatgagaatcatgaggccggtaataaatacatcccttacgggaaaatggcttcctggctggttgagtggaaaaatgccactgaaacgcaatggcttaaagattctcccagtcagccattgcaacagagtctgaaagaccttgagcgggcttacaaaaacttcttccggaagcgggctgcttttccccgattcaaaaagcggggacagaatgatgcattccgctacccgcagggcgttaagctcgatcaggaaaacagccgtatttttctgccgaaactgggctggatgcgctaccggaacagccgtcaggtcacgggtgttgtgaaaaatgtcactgtcagccagtcctgcggtaagtggtacatcagtattcagacagaaagtgaagtaagtactccggttcaccctagtgcaagtatggtcgggctggatgctggcgtggctaaactcgccacgctgagtgatggcacagtctttgagcctgtaaacagttttcagaaaaaccagaagaagctggcgagacttcagcgacagttaagccgcaaggtcaaattcagcaacaactggcaaaagcagaaacgcaaaatacagcgactgcattcctgtatcgcaaatatccgcagggactaccttcacaaagtcacaacggccgtcagcaaaaaccacgcaatgatagtcattgaggatttgaaggtcagcaacatgagtaagagtgcagcgggtacggtcagccagccggggcgcaatgtccgggcaaaaagtggtttaaaccgtagcatactggatcagggctggtatgaaatgcgccgccagcttgcgtataagcagctctggcgtggcggtcaggtgcttgctgttccgccagcgtatacaagccagcgttgcgcgtactgtggtcatacagcgaaagagaaccgcctgagtcaaagtaaattcagatgccaggtatgtggatatacagcgaacgccgatgtaaatggcgctcgcaacattttagcggcggggcacgccgttcttgcctgtggagagatggtgcagagtggccgcccgttgaagcaggaacccaccgaaatgattcaggcgacagcctgaacgtagcagggatccacgtccttcagggcgtggaggatgtcaatatcggtttctgtcagcgattaaattcaacaccacgtaacaaacgcctccggcaattaatccccaaaacgcagaaccaatcccgaccagcgtcaatccacttgccgttaccagaaatgccaccaccgccgcgtctcgctcacgctcattatgcagcgcctgatacaaactgccgccgatggtacttaacagcgccagacctgccagcatctggatccaacttacgggcagggcagccatcatcccggtaatggcactaccaaacagacctgcgagcaaatagaaaatgcctgcaacggcagcggccagccaacgttgatctttatccggatgcgcttccgggctttggcaaatagccgcggtgattgccgcaataccgacggaataaacgccgaaaggggaaaaaaccagtgccagcaatccagtaaatacaattaatgggctaacaggagcgctatatccagctgctttcattgctgcgatacccggtgcgttttggcttgccatcgtcaccagaaaaagggggagtgcaacgctcaggctgtgagcaaagctaaaatcaggggtaatataagtggggagaacgggtttaaagacaacatcagttgtgacaacgtcaccttgcgcgatgacgatcacgatcccaataatcatcgcggcaattaccgcatagcgcggcgcaacggccttggttgccagccataccagcaacatacttccacacaacgtaaattgaccgtccagactggcaaacgcctgtaaaccaaagcgtaataaaatcccggcaagcattgccgccgcaaggctgtgcggaataatgcgcatcagacgagcaaagagtcccgttatgccgcagaggactattagcgcgttggtgacaataaaaacgccgatggcttcgttaagtgttagtccctgcaatccggtgaccaacaaagccgcgccaggcgtactccatgcggtgagaacaggtacgcgataccataatgtcagagtcagcgtactgacgcccattgccagccccagcgccgtcatccagccagagatttgtgcagtggtggctccggcgacaatcgctgcttgccagattattgccgcactactggcgtagccaattaataccgccagaaaccccgccagtagcgtgggtggaggaatagaaaacagacgcatagtcacctcgtgcgttatagcgtacaggcaccgtagcatttgtccgttataacgcacaagtgataaacttccgttttgccggaggagtcgcatggaaaatctcgctcgctttttatccaccacacttaaacaactacgccagcagcgcggctggagtcttagccgactggcagaagcgacgggcgtttctaaagcaatgttagggcagattgagcgtaatgagtccagtccgacggtcgcgacattatggaaaattgccaccgggttgaacgtaccatttagtacatttatttctccgccgcagtccgctacgcctagtgtttatgatccacaacagcaggcgatggtgatcactagcctgtttccttatgatccacaactctgctttgaacacttcagcattcagatggcatctggtgcaataagcgaaagcacgccccatgagaagggggtaatcgaacatgtcgtcgtcattgatggacaacttgatctgtgcgttgatggggaatggcagacccttaattgtggggaaggcgttcgatttgctgcagacgtcacgcatatctatcgtaatggtggggagcaaaccgtacattttcattccctcatccattacccgcgcagttaagcgggaaaactatttcgcaacgtcgcgcttgtggctaaaatagccgccatttttcagctactggataagaatgtgaccgtatcttctcatcgacttgaactgttaagcccggcacgcgatgccgccattgcccgcgaagctattttgcacggtgccgatgctgtttatatcggcggccctggttttggtgcccgtcataatgccagtaatagcttgaaagatattgccgagctggtgccgtttgcccatcgttatggtgcaaaaattttcgtcacgcttaacaccattttgcatgatgatgagctggaacccgcgcaacggctgattactgacctctaccagaccggtgtcgatgcgctgattgttcaggatatggggattctggaacttgatattccgccgattgaactgcacgccagtacgcagtgcgacattcgtacagttgaaaaagcgaagttcctctctgatgttggcttcacgcagattgtgctggcgcgagagctgaatcttgatcagatccgcgcgattcaccaggctacggacgcgaccattgaattctttattcatggggcactgtgcgtggcctatagcggtcagtgctacatttctcatgcgcaaacagggcgtagcgccaaccgtggcgattgcagccaggcgtgccgtttgccatacacattgaaagacgatcaggggcgggtggtttcctatgaaaaacatctgctgagcatgaaagataacgatcagactgccaacctcggcgcgctgattgatgctggtgtacgctccttcaagattgaagggcgttacaaagatatgagctacgtgaagaatatcaccgcccattatcgccagatgcttgatgccattattgaagaacgtggcgatctggcgcgcgctagtagtggtcgtactgaacatttctttgttccaagcacggaaaagactttccaccgtggtagcacagattattttgtgaatgcccgtaaaggcgatattggcgcgttcgatagcccgaaatttatcggcctgccggtaggcgaagtagtgaaagtggcgaaagatcatctcgatgttgccgttaccgagccactggcaaatggcgatggcctgaacgtgttgattaaacgtgaagtcgtcggttttcgtgccaatacggtcgagaaaaccggagaaaatcagtaccgcgtctggcccaatgaaatgccagcagatttgcacaaaattcgtccacatcacccactaaaccgtaatcttgatcataactggcagcaggcactgacaaaaacctccagcgaacgtcgggtggcggtagacattgaactgggcggctggcaggaacaactgattctgaccctcaccagtgaagagggtgtcagcatcacgcatacgctggacgggcagttcgacgaagccaataacgccgaaaaagcaatgaacaatctgaaggatggtctggcaaaactggggcaaaccctctattacgcccgcgatgtgcaaattaatttgccgggggcgctgtttgtaccaaacagtctgttaaaccagttccgccgtgaagctgctgacatgctggatgctgcgcgtcttgccagttaccagcgcggcagccgtaaaccggttgctgatcctgcgccggtttatccgcaaacgcatctgagtttcctcgcgaacgtatacaaccagaaagcgcgtgaattttatcatcgctatggtgtgcagctgattgacgcggcgtatgaagcacatgaagagaagggcgaagtcccggtgatgatcaccaagcattgtctgcgctttgcctttaatctgtgcccgaaacaggcgaaaggcaatatcaaaagctggaaggcgacgccaatgcaactggttaacggcgatgaagtattaacgctaaagtttgattgccgcccatgcgagatgcacgtcattggcaaaatcaaaaatcacatactgaaaatgccgttaccgggaagcgtagtggcatccgtaagtccggatgagctgctgaaaacattgccgaagcgaaaagggtaaaacgccagttttctggttactcacaacttattgaatctgcatgatattgcctgccgggtaaggcgttacgccgcatccggcatcaaatgactcaacgttgtcccgcttctggtttgcggcttttttgccagtaaaaatgctcgcgcaaaccttccgcgctctcttccgccacagcacgcaattcatcgctgtccgcttcatgacgcagctgatgatccacattctttacccacacaaattcatgtcctttgtgccctgccatgagttgtccactaaacagagcacacgttaataagacaacgcttaacgccttcgtaaacatcctgccacctttttcttaccttttgccgctatgatgccgatcgtttcttgaggttattattcagttttgcaaattagcgcaaagaaattctggaatcttccttcctgattttgcattgcattctgccgttgcggcgatttagtgctattttcgagcaaattacacacggaggtaaacactaatgtttactttgttgatatactcagcggcagggaggcgatgtgaaacaaagcgagttcagacgttggctcgaatctcagggcgtcgatgtagcgaatggcagcaaccatttgaaactcaggtttcatgggaggcgcagtgtcatgccgcgtcacccctgcgatgagattaaagaaccattgcgtaaagcaatcctgaaacaactcggtttgagttaatcgccaattaaaaaggttaatgacatgcgagagacagtcgaaattatgcgttatcccgtcactcttacacccgcgccggaaggcggttatatggtttcttttgtggatatccctgaagcgttgacccagggcgaaactgtcgctgaagcgatggaagcggcaaaagatgctttactgaccgcatttgatttttattttgaagataacgagcttatccctttacctagcccattaaatagtcacgatcactttattgaagtacctttgagcgtcgcctctaaggtattgctgttaaatgcttttttacagagtgaaatcactcagcaagagttagccaggcgaattggcaaacctaaacaggagattactcgcctatttaacttgcatcatgcgacaaaaatcgacgccgtccagctcgcggcaaaggcgcttggcaaagagttaagcctggtgatggtttaattacagttaacgaaaagttgtcatttttaacaactgatatagactgccgaatcatctgcacataattacgattcgataatgaaaaaataccagcagcttgcagaacaattacgcgagcagattgcgagcggtatctggcaacccggcgatcgtttgcctagcttgcgtgaccaggtggcgcttagtggcatgagctttatgactgtcagccatgcctatcagttgctcgaaagtcagggatatattatcgcacgaccgcagagcggttattacgttgcgccacaggcaataaaaatgccgaaagcgccagtcattccagtcactcgagatgaagcagtcgatatcaacacttatatttttgatatgttgcaggccagtcgcgatccgagcgtcgttccgtttgccagcgcctttcccgacccgcgacttttccccctccaacaactaaaccgcagcctggcgcaggtaagcaaaaccgccacagcgatgagcgtgattgaaaacttaccgccaggaaacgcagaactgcgtcaggctattgctcgtcgctatgccttacagggcatcaccatttctcctgatgaaattgtcattactgccggggcgttagaggcattaaacctcagtttgcaagcggtaactgaaccgggcgattgggtgatagtagagaatccttgtttctacggtgcgttgcaggcgctggagcggctacggctgaaggcgttaagcgtggcgacggatgttaaagaagggatagatcttcaggcgctggaactggcgttgcaggagtatccggtgaaagcgtgctggctgatgactaatagccagaatccactcggatttaccttaacgccgcaaaaaaaagcacaactggtggcgttgctcaatcagtacaacgtaacgctgattgaagatgacgtttacagcgaactttattttggacgggaaaaaccgctgcctgcgaaagcgtgggatcgccacgatggcgttttgcattgctctagctttagcaaatgtctggtgcctggttttcgtattggttgggtcgccgccggaaaacatgcacgtaaaattcaacgcttgcagttgatgagtacgctttccaccagcagtccgatgcaacttgcgctggtggattacctttccacgcgccgatacgacgcccatcttcgtcgcctgcgtcgccagcttgcggaacgtaaacaacgtgcctggcaggcactgctgcgttatctgcctgcggaagtgaaaattcatcataatgacagtggttactttctctggttggagctccccgagccgttagatgccggcgaattaagcctggcggcactgacgcatcatatcagtattgcgccgggtaaaatgttttctaccggtgaaaactggagtcgttttttccgttttaataccgcgtggcagtggggagagcgtgaagaacaggcggtaaaacaattaggcaaacttattcaagaacggctgtaatagcgtttaatttaattcctcttagattgggtaatatgaatttcgaatagcagtcatatttcctaactccttgactatactccagaagataaccttacagacggcataatgcgcggtagctcacaacctgaataaattttctcaggggcgaaggtgtgcctgcaagccgccgtctatggttaaacaaggagatatttttacggcacggcggctgaacaattaattacgacaggagtaagaccttatgagcaagacatttgcccgcagcagcctgtgtgcgctcagcatgacaataatgaccgctcacgccgccgaaccgcctaccaatttagataaaccggaagggcgactggatattatcgcctggccgggatacatcgaacgcggacaaactgataaacaatacgactgggtaacgcagttcgaaaaagagacaggctgcgcggtgaatgtgaaaaccgccgcgacttccgatgaaatggtcagtctgatgaccaaagggggttacgatctggttacggcatccggcgatgccagcctgcgtttgattatgggtaaacgcgtgcagccgattaataccgcattgattcccaactggaaaacgctcgatccgcgcgtggttaaaggcgactggtttaatgttggcggcaaagtttacggcacaccttaccaatgggggccgaacctgctgatgtacaacactaaaaccttcccgacgccgccggatagctggcaagtggtttttgttgagcaaaatctgccggacggcaagagcaataaaggccgcgttcaggcttatgatggccctatctatattgcggacgctgcgttgttcgttaaagccactcagccgcagttgggcatcagcgatccgtatcaactcaccgaagaacagtaccaggcggtgctgaaagtgctgcgcgctcaacacagtttgatccatcgctactggcatgacactaccgtgcaaatgagcgatttcaaaaacgagggtgtggttgcttccagtgcctggccctatcaggccaacgccctgaaagccgaaggccagcctgttgctaccgttttcccgaaggagggtgttaccggttgggctgataccaccatgctgcatagcgaagcgaaacatccggtttgcgcctacaaatggatgaactggagtttaacgccaaaagtgcagggcgatgtggcggcctggtttggcagcttaccggtagtgccggaagggtgtaaagccagtccgttattaggcgaaaaaggttgtgaaaccaacggttttaactatttcgacaaaatcgccttctggaaaacgcctatagcagaagggggcaagtttgttccctacagtcgctggacgcaggattacattgccattatgggcggtcgctaacttcgctggggtgctttatgacgtacgcagtggagtttgacaacgtcagccggttgtacggtgacgtgcgcgcagtagatggcgtcagtattgcgataaaagatggtgagttcttctctatgctggggccgtccggctccggcaaaaccacctgcctgcgcctgattgctggcttcgaacagctttccggcggggctatctctatctttggtaaacccgccagcaatctgccaccgtgggagcgggacgtgaatactgtctttcaggactacgcgctatttccgcatatgagcattcttgacaatgtcgcctatgggctgatggtcaaaggcgtgaataaaaagcagcggcacgcaatggcgcaagaggcgctggagaaagtggcgttggggtttgtacatcaacgtaaaccgagtcaactttctggtggtcagcgccagcgggttgctatcgccagagcattggtgaatgaaccgcgcgtattgctgttggatgaaccgctcggcgcactggatctcaaattgcgtgagcagatgcagctggaactgaaaaaactgcaacagtctctcggtatcacttttatcttcgttacccacgatcagggcgaagcgttaagcatgtccgatcgtgtggcggttttcaataatggacgcattgagcaggtcgattccccgcgcgatctctatatgcgcccgcgcacgccgtttgttgccgggttcgttggtacaagcaatgtttttgatggactgatggcagagaaactttgtggcatgacgggaagcttcgccctgcgaccggaacatatccgcctcaacacccctggtgaactgcaggccaatggcacgatccaggcggtgcaatatcagggcgcggcaactcgttttgaactgaaattgaacggcggtgaaaaactgcttgtgagtcaggccaatatgacaggcgaagaactgcctgccacgctcacgcccggacaacaggtgatggtttcctggagccgtgatgtgatggtgccgctggttgaggagaggtgaatggcgatgaatgtattgcaaagtcctagtcgtccaggtctgggtaaggtgtccggtttcttctggcataatccggggctggggctgtttttactgctgcttggcccgctaatgtggtttggcattgtctatttcggcagcctgctgacactgttatggcagggattttatacttttgacgatttcaccatgagcgtaacgccggaactgacgctggcgaatatccgtgcgctgtttaatccggcgaattacgacatcattctccgcacgctgactatggctgtggcagtcactatcgccagcgccattctggcttttccaatggcgtggtatatggcgcgctataccagcgggaaaatgaaagcgtttttttatattgcggtaatgttgccgatgtgggcgagctacattgttaaagcctatgcctggacgttattgctggcaaaagatggcgtggctcagtggtttttacaacatcttgggctggaaccactgctgactgcgttccttacattacctgcggtgggcggaaatacgctgagtacttccgggctggggcgctttctggtgtttctctatatctggttgccgttcatgatcctgcccgttcaggcggcgcttgagcgtttgccgccgagtttgttgcaggcgagcgctgatctcggcgcacgtccacgacaaacctttcgctatgtggtgctgccgctggcaatcccgggtattgccgctggctctatctttaccttcagtctcacactgggcgattttatcgtcccgcagctggttggtcctccaggatattttatcggcaatatggtttattcccagcagggggcgattggcaatatgccgatggcggcggcattcaccctggtgccgattattctcatcgcactgtacctggcgttcgtgaaacgtctgggagcgttcgatgcactctgaacgcgcaccgtttttcctcaaactggcggcctggggcggcgttgttttcctacattttcccatcctgataatcgccgcctatgcgtttaacactgaagatgcggcgtttagttttccaccgcagggcctgacgctgcgctggtttagcgtggcagcacagcgtagtgatattcttgatgccgtgacactgagtcttaaagtggcggcgctggcgacattaattgcgctggtgttagggacgctggcagctgccgcgctgtggcgacgagactttttcggcaaaaacgccattagcctgttactgctgctgcccattgcgctgccgggcattgtcactggtctggcgttattaaccgcctttaaaaccatcaatctggagccgggatttttcaccatcgtggtcggtcatgcgactttttgtgtagttgtggtgtttaacaatgtcatcgcccgttttcgccgcacctcctggagtctggttgaggcgagtatggatcttggggccaatggctggcaaaccttccgctacgtagtgttgccgaatctcagtagcgcgttactggcaggaggaatgctggcgtttgccttgagcttcgatgaaatcatcgttacgacctttacggcaggtcatgaacgaacgttaccgttgtggttgctcaatcagcttgggcgaccgcgtgatgtaccggtaactaacgtggtggcactgctggttatgttggtaacaaccttgccgatcctgggggcctggtggctaacccgcgaaggcgacaatggtcaataaccactgatacaggaatatgctatgcaacataagttactgattaacggagaactggttagcggcgaaggggaaaaacagcctgtctataatccggcaacgggggacgttttactggaaattgccgaggcatccgcagagcaggtcgatgctgctgtgcgcgcggcagatgcagcatttgccgaatgggggcaaaccacgccgaaagtgcgtgcggaatgtctgctgaaactggctgatgttatcgaagaaaatggtcaggtttttgccgaactggagtcccgtaattgtggcaaaccgctgcatagtgcgttcaatgatgaaatcccggcgattgtcgatgtttttcgctttttcgcgggtgcggcgcgctgtctgaatggtctggcggcaggtgaatatcttgaaggtcatactagcatgatccgtcgcgatccgttgggggtcgtggcttctatcgcaccgtggaattatccgctgatgatggccgcgtggaaacttgctccggcgctggcggcagggaactgcgtagtgcttaaaccaagtgaaattaccccgctgaccgcgttgaagttggcagagctggcgaaagatatcttcccggcaggcgtgattaacatactgtttggcagaggcaaaacggtgggtgatccgctgaccggtcatcccaaagtgcggatggtgagcctgacgggctctatcgccaccggcgagcacatcatcagccataccgcgagctccattaagcgtactcatatggaacttggtggcaaagcgccagtgattgtttttgatgatgcggatattgaagcagtggtcgaaggtgtacgtacatttggctattacaatgctggacaggattgtactgcggcttgtcggatctacgcgcaaaaaggcatttacgatacgctggtggaaaaactgggtgctgcggtggcaacgttaaaatctggtgcgccagatgacgagtctacggagcttggacctttaagcagcctggcgcatctcgaacgcgtcggcaaggcagtagaagaggcgaaagcgacagggcacatcaaagtgatcactggcggtgaaaagcgcaagggtaatggctattactatgcgccgacgctgctggctggcgcattacaggacgatgccatcgtgcaaaaagaggtatttggtccagtagtgagtgttacgcccttcgacaacgaagaacaggtggtgaactgggcgaatgacagccagtacggacttgcatctagcgtatggacgaaagatgtgggcagggcgcatcgcgtcagcgcacggctgcaatatggttgtacctgggtcaatacccatttcatgctggtaagtgaaatgccgcacggtgggcagaaactttctggttacggcaaggatatgagtctttatgggctggaggattacaccgtcgtccgccacgtcatggttaaacattaaggataatattgcagatcgtaagagtatgagatgatcttgcgtactgtcagagcactgatttctctgacagtacgtgctgcgtgcaaaatcactacatcaaataaaccagccaaatctcatagagataagagtaaacaaaccaacagcagcaaagaaatttatcagtactacagttctactggaaacattcatttttgccaccttttatcattgcccctatgtgtatagtacgggttaagaaaatccgcaataatactcattctgaagatggataagggcaagttgctgtttgatgattttttctcaaactggtgaaaaaacttgatgcacgtcaaaaaatgacgcatatttgcgcgcgttttattcatctggctggacgcccgtacatgtctctctatcaacacatgcttgttttttatgcggttatggcagcaatcgcatttcttatcacctggtttctttctcacgataagaaacgcatccgtttcttaagcgcctttctggtgggggcaacatggccgatgagtttcccggtggcgctgttgtttagtctgttttaaatcttactcactggcttgacggcaccacgcagacttatatcatttggatgaatcgataaatttcacaagtggctaaggagaaagtatgagccatctggatgaagtcatcgcgcgcgtggatgccgcgattgaagagagcgtcattgcccatatgaacgaattattaatcgccctgagcgatgacgcggagttaagtcgggaagatcgctacacccagcagcaacgtctgcgcacagcgatcgcccatcacggtcgcaagcataaagaagatatggaagcgcgccacgaacagttaaccaaaggcggcaccatcctctgattaaaaactgcgtctggctaccaaccaggcgccaaccacaagtaaaattgcgccacaaattgggccgaacaacgcccgtagtggtacgccatgactgcggaagatatccagcatcagaccgccaatcagctgactggcgaccagtacagcaatagttgtcgccgctcccacattctgatatccgctgatactggcgaagacaaaaaagcttcccagcaagccaggtataagtgtccaccagcgcacgctggacaccagttcgccaaaccccgccatgccttgtttaaaccataaaatagaaacaaagagcacaatccccaccagactgttcagcaacatggcgatgagaatggtagaggaggtctgggtgatgcgcaccatcagcgtgttctggacaaccagaccaattccggcggcaatcaaaaaagcaagggtgaggctctgattcatccaatcgcgtccggttcagtgcgctcgtcgagttgcaactgcataaatgtcagatccagccaacgaccaaatttagtgcctacctgcggcatttgcgcggtgacgacaaatcccaggctctggtggagatgcaggctggcctgattttggctttcgatcccggcgaccatgacatgcttcccgcaatcccgcgcttcatcaatcaatcggcttaacaatttacgccccagacctttgccctgatgatcgggatggacataaacgctatgttccacggtatggcgaaaaccatcgaaactacgccagtcgccaaagctggcatatcccgtcactacgccgttttcctcgctcaccagcactggataacctgctaaagtccgcgcttcaaaccaggcaatgcggttatcagcatccaccgtttggtcattccagatagccgccgtatacaacacggcgtggttataaatttccgcaatggcagcacagtcggctttgcgggcaaaacggatggacatgtctggcctcaataaaataatgatgatgatgttatcaatactatcgaaaacagcccgaagcaacggattcctcgatgaaattattgcgtgttgcagaggggatgtgacggctgcaaacaaaaccaatcccgtgagcctgctactattgatggattcatgccaaaagcacaggagagcattatggggcaacaaaagcagcgtaatcgacgttgggttctggccagccgtccacatggcgcacctgttccggagaatttccgtcttgaagaagatgatgtcgccacaccgggtgaaggacaggtgttactgcgcacagtttatttgtccctggacccgtatatgcgtggacgtatgagcgatgagccatcttatagtccgcctgttgatattggcggcgtgatggtcggcggtacggtgagccgtgtcgtggagagcaatcatcctgattatcagtctggcgactgggtgctgggctacagtggatggcaagactatgacatatccagtggtgatgatctggtgaaacttggcgatcatccgcaaaatccaagctggagcctgggtgtgctagggatgccaggctttaccgcttatatgggcctactggatatcggtcagcctaaagagggcgaaacgttggtggtagctgcggcgacaggaccagtgggggcgacggtggggcaaatcggcaaacttaaaggttgcagagtggtgggggtagccggtggcgcggaaaaatgccgccatgctaccgaggtgttaggcttcgatgtttgtcttgatcaccacgcggatgattttgccgaacaactggcgaaagcgtgcccaaaaggtattgatatctattatgaaaacgtgggcggtaaggtattcgatgcggtgctaccgttacttaatacatctgcgcgcattcccgtctgcggattagtgagcagctataacgctacagagctaccacccggtccggatcgtttacctctgttgatggctacagtgctgaaaaaacgtattcgcttgcaaggttttattatcgctcaggattatggtcaccgcatccatgagtttcagagggagatggggcaatgggtgaaagaggataaaatccactaccgcgaagaaattactgacggtttagagaatgcgccacagacgtttatcggcctgctgaagggtaaaaacttcggcaaagtggtgatccgcgtggcgggtgatgattaaagtttcaacggcggcgtaagccgccataaaaatccaggcaaaaagcttattttcagctttaattaactaaccacatcattgttctgctgctaataacaacaaaggtgagtggtttatgattattcactttaatacaccaggtgaattccttctgccatgcaggcagggttggacagaaaacacgcgaaggaattaaaatgcctggaacgggaaaaatgaaacatgtcagtttgactctgcaggttgagaacgacctgaaacatcagcttagtattggcgcattaaaacctggcgcacgcctgattactaaaaatctggcggagcaattaggtatgagtattacacctgtgcgtgaagcattattacgtctggttagcgtgaatgcgctttctgtcgcacctgcacaagcatttacagttccggaagtggggaaacgtcaattagacgaaatcaatcggatccgctacgaactggaattaatggcagttgctctggctgttgaaaacctcaccccgcaagaccttgcggaactccaggaattgctcgagaaattacagcaggcgcaagaaaagggcgacatggaacaaatcattaatgtaaacaggctatttcgcttagcgatttatcatcgcagtaatatgcccatcctgtgtgagatgattgagcaactgtgggtcaggatggggcctggtttacattatctctatgaagcgattaatccagcggaattacgggagcatatagaaaactatcatctgttactcgctgcgttaaaagcaaaagacaaagagggatgcagacattgtcttgctgaaattatgcaacaaaatattgctattttataccagcaatacaatcgttaaagtaaatgcccggcaaataccgggcatcaaggtaattactcaaatctccacgcaatattcatgccgacaccataatttcgtccggggctaggttcgtaatatcgcccgttactctcattgacaatgacagaaccaacgtattctttatcgaataaattatcgacacgaccaaataaatccacagttaaattgtggtaattgtatttatacccggtgaataagccgacgagagtataagacggcgcttttgccgtattttcatcatctgccataatatcgcccatataacgcgcttccgtgcctgcataccaaccatcttccggtacataacctatgctcgcaaagcccatattacgggcgatccctggcatccgattaccgttacaatcctgttcattgcaaacattgctgcgataggtcgcatcaagccaggtccaggacgcgtttacgcgaaaatctcctgcgaaacgttgatcccatgccagttcagcgccttgacgacgggtctttccggcatttttgtaagtcgtacgcccaccgctactgctatcgacaacaatttcatcatcagtgtcggtctgaaacaatgcgagactaagcagcccatcaccaatacgcgttttactgccgatctcaattgtatcgttggtggatggttttaaacctaagttcataccgctttgcccatcagcacgataagacagctcattaatcgtcggcgtttcaaaacctcgcccggctgccagatagatattccaggcatcggtcattgcatattttaagctaccggcaggtagccatttatgataactggcatcaccgctgtcatcgccgttacccggagtaacgtaatggtcgttggaatcaaaccacacggagctgtagcgcacgccagcatccaggctcagtttttcgctcagctgccactgcgtctgtaaatagggatcgatgttccacatcagattgcgttcgtcgcgacgcaactcacctttttgcccgtactccggcatgccgctattcaggcggaagttattgtagcccttgcggttttcactcatgttttcgtagttcaggccggtagtgaacgtgaccggaacgcccagttcaccacggtgtgtccagcggctgtctattccctggtaatggcgttgcagggtaatcacgccgcccgcatgactcgggttaagttgtggtgccatgggtatactctggtactgggtcgtttctcgctctccggcatacatcatcacactcatatcatcccggctactcaggctacgctcatagcgcaacccagcctgagtttgcttgatggtttttcgcgtgtcgtactgttctgcacgaggcgcttgttgtggattagccttccattctgctttggttagcccacctgggtcatctgctttgatatccacactattgaaaatcagacttaatttgctggcttcatcaatgcgtacgcccagtttggcattggctaaatttttctgtgcgccactatggtcacgatagccgtgggtcgtaaaacgcgtggtactgacggtgtaatcgacatcgccaggctgtgtgccgtctcccgttgcgcccgttgctttcagcccatagcgccagctgccaaaactgccgtagtaactactggcttcaatggttggtggctgttgtccggtctgggtggtgacattcattaccccaccagacgcgttgccatacagggcagagaaggggccacgcagcacttccacattttgcacactgcttaaatcgatgttggatgtttgcccttgcccgtcgggcatggtggcgggaataccgtccacatacaggcgaataccgcgaataccgtaagtggagcgggagccaaatccgcgaatgctcagctgtaaatcttgcgcatagttctgccggttttgtacctgcaaaccaggcacgccggtcagactttcggacaagttaatgcgcggtgttgccaggcgcatctcctcgccatccaccacgcttactgctgctggggtatccagttcactaaccacctgcggtgcggcactgacaatcatagtctgttcatcagcggcaaaaacaacgggggaaaggacaagcagtgcgggcaaaacggtctgtcggacggaaaaaatcttcatgaaaaaagccaggttaagaatgggaaaacgccgtcatggtaatgaaattgtaaatttatggaaaatgaaacggcacaatacgttaagtaattgagaaaattgtagtcgtaacggcaagaaatgctccacatttgagaaaataatgattaccattcccatttataacaagagcgtaacgatgattacgcttagcgaagcattgtgaagcagcaaaaatatcggttcatcaaagggagtcgtcatgcatttacgtcatctgtttagtagccgcctgcgtggtagtttactgttaggtagtttgcttgttgttagtagtttcagtacgcaggccgcagaagaaatgctgcgtaaagcggtaggtaaaggtgcctacgaaatggcttatagccagcaagaaaacgcgctgtggctcgccactagccaaagccgcaaactggataaaggtggcgtggtttatcgtcttgatccggtcactctggaagtgacgcaggcgatccataacgatctcaagccgtttggtgccaccatcaataacacgactcagacgttgtggtttggtaacaccgtaaacagcgcggtcacggcgatagatgccaaaacgggcgaagtgaaaggccgtctggtgctggatgatcgtaagcgcacggaagaggtgcgcccgctgcaaccgcgtgagctggtagctgacgatgccacgaacaccgtttacatcagtggtattggtaaagagagcgtgatttgggtcgttgatggcgggaatatcaaactgaaaaccgccatccagaacaccggtaaaatgagtaccggtctggcgctggatagcgaaggcaaacgtctttacaccactaacgctgacggcgaattgattaccatcgacaccgccgacaataaaatcctcagccgtaaaaagctgctggatgacggcaaagagcacttctttatcaacattagccttgataccgccaggcagcgtgcatttatcaccgattctaaagccgcagaagtgttagtggtcgatacccgtaatggcaatattctggcgaaggttgcggcaccggaaagtctggctgtgctgtttaaccccgcgcgtaatgaagcctacgtaacgcatcgtcaggcaggtaaagtcagtgtgattgacgcgaaaagctataaagtggtgaaaacgttcgatacgccgactcatccaaacagcctggcgctgtctgccgatggcaaaacgctgtatgtcagtgtgaaacaaaaatccactaaacagcaggaagctacccagccagacgatgtgattcgtattgcgctgtaatagatatggcgagggtgaaaacggtgagacttgcctgccttttatcacggcgtatccggcactttcgtcagtaatctgaatttgcccggcacgtagccgggcaattttgcaattaactcgccgtttcaggcttaaacacaatttcctgtttttcttcatcttcctcgacgactggcgcagtgctgtgaatttcagcaacgcgtttgcgcacaccaaaccagcctataaccagcaaaataccgataatcggcagcgccgcgatagtataagtcccgttcgggtaatcgaacgccatcagcacaaggacactcagtaaaaacagtaatgtcagccaggaagtgaagggcgcgccaggcagtttaaaactgacatccgctgctttgccttctttaatcgctttacgcaggcgcatctggcacacgatgataaacgcccaactagcgatgattcccaggctcgcgaagttcaacacaatctcaaatacgcggctcggcaccagatagttgaggaatacgccgacgacatacacaactagtgtcgccagaatcccggcatacggcacatgctgacgactcattttcgccataaaactcggtgcggaaccgcccatcgccatactgcgcagaatacgtccggtgcagtacagaccactattcaggctggagagggcagcggtcagcaccacaatgttcataatgctgccgatatatggcacacccagtttagagaaaaacgtcacgaacggactttgccccgcctgatacgcgctccacggcaataacataaccagcaacaccacggagccgacgtaaaacaggccaatacgccaaatcacactgttaatggctttaggcaccatggtctgcggatctttacattctccggcagctgtacccaccatttcaatggaggcaaaagcaaacactacgccctgaatcaacaccagcgcaggcagcaaaccgtgggggaagaagccgccattatcggtgattaaatgaaagccagtggtgttgccatccagcggctgaccactaccgaggaacactgtacccacgaccaaaaaggtcacaatggcgagcactttaataagcgcaaaccagaactccatctccgcaaaccatttcacaccgatcatattcatggtgccaacgatggtaagtgcagcgagcgcaaagacccactgcggcacgccgccaaacgcaccccagtaatgcatatacagagcgacggcggtaatatcaacaatccccgtcatcgcccagttgatgaagtacatccagccagcaacataagcggctttctcacccaaaaactcacgggcataagaaacaaaactgccactggaagggcggtgtagcaccagctcacccaatgcacgcagaataaaaaagctaaacaagccacaaattaaataaaccagtgccagtgcgggccccgccatttgcagtcgggctcctgcacctaaaaacaagccggtgccaatcgcgccgccaatggcgatcatctgcacctggcgattgcccatcgctttgtgatacccctcttcgtgggcattaagccagcggcgtttcgcggcgtgttgatcactagtgtcggtgtcgtgtttactcattgctctccctgattgctttaatgaaaaagtcatataagttgccatgaacaatgtttattcatcctggcgatgatagttatcaccattattctttatgggtataaaactatcggcgcagcatcctacccgttatcgataaacgatgcaaaacatccccttacaatcctgaaggggattaatacaactgacgaaaaaatgacaaatccttttgctggttaacctgtgtactgtcctacacttaatctttaaaagattgtgaggggcatatgattaaggtgtatggcgtacccggatggggctctacaatcagtgagctgatgctaacactggctgatattccttatcagttcgttgatgtcagtggttttgaccacgagggagctagtcgcgagttattgaaaaccctgaacccgttgtgtcaggttccgacactggcattggaaaatgacgagattatgacggagacagcggcgattgcattgatggttctcgatcgtcgcccggaccttgcgccaccggttgggcgcgccgaacgtcagctgtttcaacggctattggtctggctggttgctaatgtctatccaacattcactttcgccgattaccctgagcgttgggctcctgacgcacctgaacagttaaagaagaatgttattgaatatcgaaaaagcctttatatctggttgaatagccagctcactgctgaaccttatgcgtttggtgagcaactaacgctggtggactgttatctttgcactatgcgcacatgggggcctgggcatgaatggtttcaggataatgccacgaatatcagtgcgattgctgatgctgtatgtcagttaccgaaattacaagaagtattaaaaaggaatgaaattatttgagtgggataccagaagattatgttatttattattcagtaactttatccacaatgatgggcgtaattaattaaattcatggtatgttttttaatttatatcactctccttttcattcagcgtgtctatttcatttcctctgaaaagaaactaactattcacatcgtgcagatgtttcagttgttaagtcaggcattctataatctcaaaatgtttttaatgatggatatgctcggagttggagatgcaattaatattaatacaaataaaaatatccggcaggtatgctaaaaggataaatggcgttctctgtatttattcgcaattatctgtaggacaaatatggagagcttgatgagtcagagctaaaacagcaattgattaataaacatgttgatttattcaagaaaatggatgtattttaaatgttgattcttaatataacctaatcaatagattatcaagtgagagctacacattattggaggggcaggggaaaacaccattttgggaacaatgcatcaggtactcttaccactgaagcaagatcatccggcaccaggtggtggtgcagtgctttggaaatggtcccctcgggggagttgtcattattttctatgctatttgcttattatattcatcaggtgaatttaataaattcctaatttgaaatatccactattaagctagtgtttaacgacgttaagatggcaatgtgcagatcatgttatcagggtggggcggtagcgtatattccttatacaaaccatcattcatttcaatgattgttattgaattatttattgttgtgaataaaaagacattatgaatattggtttgactttgcatatcaggttttttattactcgctgtaatgtacgagcctgtcgtgaataacgtcgagaacccatccgttgcgtttgtgattattttgttgactaaacagacacccgtttctctgaagtaaaatcccagactaaatcatcacataaccatgacatttttctgatattccccggtaacgccagataacgatgccaaatttaccgttatgttcaatcaactccctggtccatgtcgatttatctaccacaatcgccacgcgtggaggttcaaactccaccggcattgaccaggctgcagccataatgttacgccgctgggattgctcatcgaaactggtgatcaagaccgttgggccatgatttaacagacggctggcatggtgtaattctatggggatgaatcggctcatggtatcgcctcgcgaagaaggtttttttaagcgtagtccgtaacgcaataagtaacgaaattaacgggattggcgatttgcgaacgtgatgcatgtccgcgatcgcacaaaatagccggtgcggcgtctattccaggttataagttgagaaaaccactaagggaaacgcctgatgacgcccattctgaatcactattttgcccgtattaactggagcggagctgctgcggtcaatattgatacgcttcgtgcattgcacctgaaacacaattgcaccattccgtttgaaaacctcgacgttttgctgccgagggaaatacagcttgataatcaaagcccggaagagaaactggtgatagcccgtcgtggcggttactgttttgagcagaatggcgtgtttgagcgggtgttacgcgagctggggtttaacgttcgcagcttgttagggcgcgtagtgttaagtaatccgccagcattaccgccgcgcacccatcgtttgctgttggtggaactggaagaggaaaaatggattgctgatgtcggtttcggtgggcagacgctaaccgcgccgattcgtttagtttccgatctcgtgcagaccacgccacacggagagtatcggttgttgcaggagggtgatgattgggtgttgcagtttaatcatcatcagcattggcagagcatgtaccgttttgatctctgcgagcagcaacaaagcgattatgtgatgggcaatttctggagcgcgcactggccgcagagccattttcgccatcatttgctgatgtgccgccatttgccggacggcggcaagctgacactgaccaattttcattttacccattatgaaaatgggcacgcggtggagcagcgaaatctaccggatgtggcgagtttatatgctgtgatgcaagaacagtttggtctgggcgtggatgatgcgaaacatggctttaccgtggatgagttagcgctggtgatggcggcgtttgatacgcacccggaggcgggaaaataatttatgtcaggttgccggatgcggcgtaaacgccttatccggcatacattagcccggttgtagacctgacaggcgaagcgcatcagacaacggtttcagagttcaattgcccattcggcatgaaacaaaatcaccgctgtgccactaatggtgactttttccggttggttatcacgaattgtcaccgtcacttcaatcataccgtcacgccccaatgcgcgcccctgatggcctttaacacgcaacacgttgccatcgtggggcaatacgttgtgatgtaccaaccatgcacccatcgggccattggcattgccagtcaccggatcttccacaataccaatcgcagggctgaacatgcgaccatcggtttcgtttttgcctgggcggatctggaacgggaagaaaccattgcagccaatctttttgctgatagcggtcagcgcattaaggtcagggctaagggcgtcgatatccacttccggtttcagtgggatcatcactttactgtgtcctgttgttgccacctgaattggcaagcctggcagaatatcgtcctcagtgagatgaagcgcgttgataatcgccgcacgtgtttcaccttccagcggtggctcaaagcccggcgtaccttgttccaggctaatacgataatcatcgttgtgcttttcgatagtcacgcgatgttttcctgccaggcttgtttgccagatcgtgcaatttcctaaacctaacaccttcgcacgtacatagtgcgcagctactgtcgcgtgaccgcaaatcggcacttcaaccgttggcgtaaagtagcggatgcgcacatcgctgtcgtcgctgtgcagcagaaaagcagtttcgctatggcctaactcgcgggcgataagctgcatttgcgcttcgctaagattatcggcggggaaaacaacaccggcagaattgccgcgaaacggttgactggtaaaagcatcgacgtggtacacctgcggtttcattaacgttctcctgtgactggagaactatcatagcctgcaagtggccggagagcgaagggctatccggccagggtgaaattatcgccggctacgcacaatttgatatcgacgagtaaagtactcaaacggcgcgctccacacatgcaccagtcgggtgaacgggaagagcaggaagatggtcattcccaacaccagatgcaggcggaagacgaacgctacgccgttgagcatctcactgcttccaccacggaaagtgacaatgctttgcgcccaacccaccagcttcatcatttcgctaccatcaggatactgtgcactaaacggtatggtacttagccccaacagacactggatcagcaaaatgctcatgatgatgatatccggcgtagtggaagtggcacgcacgcgctgatttgtcagcctgcgccacagcagtcctgcgccgccaatcaacgtcaacacaccgcaaataccgccgagcaccatcgccatgagttgtttcgctgccactggcaaaaaccacgcgtacatccagtgcggcgttaacatgccgaacaagtgcccgaagaaaatccccaaaatgccgatatggaacagattgctccatatcaccatcccgcgtttatcgagcatttgactactggaggcgcgccaggtgtactgcccgtagtcgtagcgcagccagctgccgaggaaaaacaccgtcgcacaaatgtacgggtagatatcgtaaaaaaagacgttcagatactgaatcatttcccacctcccgcactgatgtcgacatattgcggcgcgacatcctggctaaagcgtcgctgatattgattaagcgggctgctgtcacacgccgtggcgttatcttcaataaacttcacctgttcctcttcccacactgcatcaagcgcctggcgggtgtcatcgcgctcttcgctgtttacttgttttgtgacactgtcactactaagggagcttcccgccagttgcagcagagcatcaaacaacgcgtaccacggtgcctcgcgttgttttaagcgaccgccaagcagggcgaggatcggcgcaacattgagcaatccttctttcgcctgatcgtcaggcagtacgcttaaatactccagatacagcggtagataatcgggcagttcccgacaatccagctgcaggccgaccttttcatactccgccagcaggtccaccattgcctggccgcgatcgcgggactcggcatgaacatgttcgaacagcagcaggctcgtggtgcgcccgcggtcaaacacttcgcaccattcggcctgtttatccagcagcggcgcgttaagcaggttgtgggtgaaatccgtaagcatcggcgcgtcgcggcggatcaacgccagcgcgtcctccttgcattcccacaacagctcgtccggatactccatcaacaggccgatcactttgaggatctgcattattcgccctccgctttgtcgcgcacttcggtgatgttgatggcatcgatacggctactgttgaacaggttgaatttactgtcgctaccgtggcaaccgtcgccaaaggtaaaaccgcagccgttgcgttctgcgaaggcatcgcccgccatttcccgatggctggtcgggataacaaaacgatcttcatagttggcaatggcgagatagcgatacatctcttcgacctgggcgacgctcaggcctacttcgtcgatggcacgagtatcagtaacgccttccacggtttgactacgcatatagtggcgcatcgccatcatccgtttcagcgcccgcagtaccggaccggtatcgccggcactcaacatattggcgagatattgcaccggaatacgcaggctttcgatggcgggcagcacgccttcgcttttcggcaaaccgcccgcatctgcgtaggactgaatcggactcagcggaggaacgtaccagaccatcggcagggtgcggtattcagggtgcaacggtagtgccagtttccagtccatcgccattttgtagactgggctacgctgggcagcgtcaatcacattttgtggaataccttgtttcagggcttcctcgatcacactgggatcgtgtggatcgaggaacacttcgcactggcgttcatagaggtcaacttcgcgctcggtgctcgccgcttcctcgatgcggtcggcgtcgtaaagcagcacgcccagataccggatgcgacccacgcaggtttcactgcacacggtcggttgaccggactcaattcgtgggtaacagaagatgcatttttcactcttgccgcttttccagttgaagtagatttttttgtacggacaaccgcttatgcacaaacgccagccacggcatttatcctgatcaatcagcacaatgccgtcttcttcgcgtttgtagatagcgccgcttgggcaggtcgccacgcagctgggattgaggcagtgttcgcacaggcgcggcaggtacatcatgaaggtgttttcaaactgcccgtacatctccttttgcatggcctcgaagttgcggtcgcgggcacgtttttcgaactcaccgcccagcagttcttcccagtttggcccccagatcactttgtccatccgtttgccgtcaatcagactacgcgggcgagcagtaggaatatgtttgccttccggtgcgctatgcaaatgttcgtagtcgaaggtgaaaggttcgtagtaatcatcaatctgcggcaccaccgggttggcgaagattttggttattacgcccatcttgttgcccagacgcgggcgtatcttgccattcacatcacgcacccagccgccttgccactcttcctgatcttcccagtttttcggataaccaatgcccggtttggtttcgacgttgttaaaccatgcgtactccatgccttcgcgcccggtccagacgtttttacaggtcacgctacaggtatggcagccgatacatttgtcgaggttaagcaccatgccgacttgactacggattttcattttttcgcctcctgtacctgatcgcgaccttcatcatccagccagttaacgttcttcatcttgcggatcatgatgaactcatcgcggttgcttccgacggtgccgtagtagttaaagccccaggccagctgcgcgtaaccgccaatcatatgcgttggtttcgggcaaacgcgggtaacgctgttatgaatgccgccgcgcatgccagttacttcgctaccaggaatattcataatgcgttcctgggcgtgatacatcatggtcatgcccggcggtacacgttggctgaccaccgcgcgggcagtcagcgcgccgttggcgttgaatacttccacccagtcgttatcgacaatggtcagttctcgggcatctgtttcgctgatccagacaatcggtccaccgcgagagagcgtcagcattagcaggttttcactgtaggtactgtgaatgccccatttctggtgcggcgtcaggaagttaagtgctttttccgggaagccgtttggcggtatctggcgcatctcactgacgctacgggtgtcgataggcgggcgataagccaccaggctttcaccaaaagcacgcatccacggatgatcctgatagagctgctggcgtccgctcagcgtgcgccacggaattaactcatgaacgttggtgtatcccgcgttataggagacgtgatcgctttccagaccggaccaggtggggctggagataattttacgcggctgcgcctgaatatcgcgaaagcgaatcttctcgtcctctttgtgcagcgccagatgggtatgttcgcgcccggtgatctcgcccagcgcctgccacgctttgactgcaacatgaccgttggtttccggtgccagtgccagaatcacttcactagcgtcaatggcggtgtcaatcagcggacgcccctgtgccgggccatcacgcttggtgtaattgagtttgccgaggaaatcgatttcatcctgggtattccagctaatccctttaccgccattgccaagtttgtccatcaatggcccgaggctggtaaagcgttcatacgtagcagggtagtcgcgctccaccgccacaatattcggcgcggttttgcctggaatcagatcgcattcgcctttgcgccagtcgagcacttcacacggctgactgagctctgccggagagtcatgcagtaggggttgtaataccacgtcggtttctttgccaagatgacccacgcacacttggctaaatgctttggcgatacctttgtagatttcccagtcgctgcgactttcccacgccggatcgaccgccgcagaaagcggatgaataaacggatgcatatcgctggtgttcatatcgtctttttcgtaccaggtggcggtgggcagaacgatatcggagaacaggcaggtactggacatgcggaagtcgagcgtcaccagcaggtcgagcttgccttcaatcgctgcagtttgccactcgacttcttccggtttgatcccgtcgctggcaccgagttcctcgccctgaatcccgctttcggtccccagcagatacttctgcatatactcgtggcctttgccggaggagccaagcaggttagagcgccagacaaacaaattacgcggatgattgctgctgctatctggttgttcgcaggccatacgtaaatcgccgcttttcagcgcctgggcggtaaattctgtgggggataatccggccttgtcggcttcagctttaatcccgagcgggttacgccccagctgcggcgcagaaggtagccagcccatacgttcggcgcgaacgttgaaatcaatcagatgaccgctgtacttactggcatcggcgagcggactaagtaactcctgagcagagactttttcatagcgccattggctggaatgattgtagaaaaagctggtgctgttcatttggcgcggtggtcggttccagtcgagcgcaaaggccagtggcaaccagccggtttgtgggcgcagtttttcctggccgacatagtgtgcccagccgccaccgctttgcccgacacaaccgcagaagatcagcatattgatcatcccgcggtagttcatgtccatgtgataccagtggttaacacctgcgccgaggataatcatgctgcgcccatgcgttttatgggcggtatcggcaaattcacgggcgatggtttcaatatactggcgcggcacgccggtaatttgctcaccccaggctggggtgtacggtttgatttcagcgtaatctttcgcactgttttcatcttccagcccgcgatcgaggccgtaattcgccagtaccaaatcataaacgctgaccaccggacaggtgttgccatcgactaacgtcaggtttttaacgggcaattggcgcaccagcaccggattgtgttttacgctgcgaaaatgcggattttcaatgccgccaaagtaggggaaggccacgcctgcaacagcgtcatgttgaccgagcagggttaagctcaattcggtttccgtaccggcggcaatggattccagattccatttgcctttttctccccagcggaaaccaatgctaccgttcggcactaccaattcacctgcggtattaactgctacggttttccactgcggattgttgctttcgcccagtccatccaccaggtcagatgcgcggatcatgcgcccgggaacgtagctaccatcgtcgcgaggctccagcattaccagcatcggcatgtcgctgtagcggcggcagtagttgataaagtagtcgctgggattatcgagatgaaactcttttaaaatcacatggcccattgccatcgccagggcgctatcagtgccttgtttcggtgccagccactggtcgcacaatttggccacttcagagtagtcaggggtaatggcgatggttttagtgcctttgtagcgtacttcggtaaagaagtgggcgtccggcgtacgtgtctgcggtacgttagacccccaggcgatgatgtagctggagttataccagtcggcagattccggtacgtcggtttgctcgccccaggtcatcgggctggcgggcggcaggtcgcaataccagtcgtagaaacttaaacaggtgccgccaagcaggctcagataacgcgttccggcggcgtaagaaaccatgctcatcgccgggatcgggctgaaaccggcaacgcgatccgggccgtaggttttgatggtccagacgttagcggcggcaatcagctggtttagttcctgccagttggagcggataaacccgccgcgcccacgcacttgtttgtagctcaggcacttttgcggatcgttcataatgcttgcccacgccagtaccggatcgctgtgttgcttgagggcttcgcgccacagttcaatcagtcgtttacgaatgagcgggtatttcaggcggttagcgctgtaaagataccaggagtaacttgcgccacgcgggcagccgcgaggttcatgattgggcaggtcagggcgagtgcgcgggtagtcggtctgttggatttcccaggtcaccagaccatttttaacgtagattttccagctacaggagcctgtacagttaacaccgtgggtggaacgcacgattttgtcgaactgccaacgctggcgatagctgtcctcccagtcgcggttgctatgcatcacctgtccgtgaccatcggcaaaggtttcgcccttttgtttgaagtagcgaaagcgatccaaaagtttactcatgacatgactcctgctccaggaatgaattgggatctgatgccttgtcggatgcgacacggttgtacatcaggcatcgatctcttatttttggctgaacttccgccgaccataaaccagccaggtcagcagcacacaaacgatgtagaagattaaaaacactttcatcgcgccgaccggagagccggtcatattgaggctcatgccaaacgcctgcggaataaaaaagccgcccactgcgccaatggcactgataaagcccagagccgccgccgtttcggtgacggcttcttcatgagcttgctcatcactaccgcctttcatctttacccgataaatggttatctggcgaaagatgacggcgatcatctggaaagtagaaccacttcccagacccgcagtcagaaacagccccataaatacggcgtaaaaggcgatgaaattaccggagcctgtgcccggtaaggtaaggaacagcagggcactgaaaatcgccataaaaataaagttgatcaacgtcacccgcacgccgccgaacttatcggaaatagcaccaccaacgctccgcgcgatggcaccgataaatgggccaaagaacgccaggcgcagaatattcacatccgggaactgggtttttgccagcatggcaaaacccgcagaaaaaccgataaagctaccgaaggtggcaaggtaaagcaggctcagcagccagagatgcaggcgttgtaagacagggagctggtcggcaatactggcgcgactactggcgatatcattcatcccactccatgcggcgatcgtggcaatcgccagtagcggtacccaaatccatgcggcattcgccaggctcatcacgctaccgtcggcctgcggtacgccattgacgccgagaaaggcaaatacaggtacaaaaatgaccagcggtgcaaccagctgcattacacttacacctaagtttcctaatccgccattaatcccaagagcgctcccttgtttggcttttggaaagaagaaactgatattgcccatgctgctagcaaagtttgcacctgcaaaaccgcatagcaaagcgataacgataaatatcccaaaaggagtattcggattttgcacggcaattccgagccagacgcaaggaataatcaggattgcagtactaaaaaccgtccatcggcgtccaccgaatataggcaccataaaggagtagggaacacgcaataatgcgccagaaacggagggtaatgcggttaataaaaagagttgatcggtagtaaaattaaaaccgattttattgagattaacggtaactgcgctaaatagcatccagacacagaaggcaagaagtagacaactgacacttatccagagatttcttcgagcaatatgttttcctttattttcccagaaggccggattttctggtttccagtcgcgcaaaagataacgactatttttctcattttgcagtgccatattgttcctcacatgcacacattggtaatgaaaaaaagacaaaacacgaggtaaggcgcaatagccagttattagaattaaggatgaattgggtgaagtgctgattgaaagaatagataagaaagcgtaaccgcgggggcagaatggggattaagtagccagatatgtgttactaaatgtaactaacaagctaaccttcaaacggggttaatctttgaacgtatgtcatgtttcaacccttcagatcgtgaatctaaagggttacatattaactatattatcaacaagaccagacacttatagaattagtgatgatttattcattaaaaaggccaactactggaggaaaagcttctgtccagaaggtctatcggttcctctcttattgcctgattgtaataatcgttattacagtaagtattgtttatttcatctaaggtcatgtttttaacttttatattcatctggtttacaacttcctctgtcttgtaagtgtgtatattatatggggtatatgcttttttaataggatagtgaaacaattcgttatccacatctattccgtcagagtgaacttcaaatgcaccagggctaagaattgccaggccagtattaagcttaagtgctggggaaaacaaattaaataacatgagctgcatagtagggcaattgttcttcccagaaacatttaaaaaatttaagttttgctctgttttattatggggaataaagttccaatatcggatgtattattagtatcaatgtgggttattttattattgtccagtcttaaacttttgatagatggaagataagtcaggaaatcaagatttatatatttcaactggttgttagcagcgtttaatgtctgaacattgcagaagttgctatagaatattttaatttcagaaagcaaattgttgttaataagtaacgtattcaagttgggaaataagtcattgtgtaaacttgttagtttattatgggatagatccagcagtaagagttcatttttattacctgcaacaatatcagttaattgattatggctgagattcaggtattgcagccattcgcaagattctaattgcacaaactctagttgattatgtgccgcactaaaataagtaacactactaagcctatctatatcaatatttctgagagcattattattcatagatatatgtgtaatacttacatttctgccttgaggaaaatttatactctcaagagcattactattcagacttagctttacgagtctatcgtagttggttgcatcaaaatgtgtgaattggttattatcaagattgatagatgtgaagttttgcagccctggtggttgagtggttaaattaagtccacttaaatcaatggtcacttcattagtgtcatcaattatatttcttactgcagtccagtactgcatttgtgcaagtggatcattgttgatgccgttaactaatacatgccaaagatgtttactacttattagttgatcaatgtcattggttggcagtaaattgttattgcttaagtttaaatattccagttttgtagtgtttttggcgtttaaatgtgcaatatggttgtcgtttaaagtgattgttttcatcctgggatgattgtgtaatataaggtcagtgatcatattgtgatgggcacttaactcaatcagagattcttgccgcggctgccgttggcttcatcgttatagcctttaaaatcatattcccagtgaccaaaaccaatcatttgatcattgatttgcgtttctcctttaaagccgagacgggcataagttttatcaccatcgtcacgcttatcatcagtaaaataacgtagagcggtaaccttgccataaaggtcgagtttattaccatccttgttatagacttcggcagcgtgtgctacgttcgcagctaacaaaccagttacaaccaccgcaactatttttaatttcatttaacagaatccttttaattatcgttaaacgtattttctaaacgaattttaaacggcgtcatttataaatgacatactgtttttaaaatagaatggtgattaaaaacaatgagaaaaatagatgaaataatattatttatcgatatgtgatcgaagtcgaaatgagatataaggtgaattactggtatttgaaatttatttttttaatattgtcggaatttatctgattaactaccgggccgtagacccggcagttattttaaccacgacgtgtcgccagccagcagagcagggaaccgccgcagaccatcagcgcgccttgccagaagctgaagctcagcggggcgctgagcagcacggctgcaagcgcactggaaagtacaggcgtaaaatagctacctaccgccataatggtgacattgccatgcaatataccgacattccatgcagcataagcaaatcctaaggtaaatgccgcagagatgagtttaatcatgacgggcgtgctaaatatcatttctggttgtggcgtaagaaaatagtaaacccacagacttgctcccgttagcaggacaaaaacggtaattccattaaatccgcgtgcgtatttattcgttactgtgcaataggctgcccagataaacgcaccaatgaacgccaggaaataactcaatgggctggtggtgatattattgatgatttcatcataatgtaacccattgtcaccgcctaacacccaacagacgccgacgagggctaataataatccaggtacaatcaaccagttggttttctgaccattaaacagaatggcaaagagaattgtcaggctgggccacagatagttcaccatacccacttcaatcgcctgatgatgggtcgccgcataccctaaggaaagcgccagacagatttcatagctgacgaataacagactcccggcgagtaaatagcctttcgggatttgccgaatacgcggaaatccaaccgtgaagattaacagcagcccgcttaaactatagatagcagctgcgccgccgaccgggccgagcccctcactgacaccgcgaatcaatcctaccatcgtgctccacaggacgatcgctatcagccctatgagcgttgctttttgtcgtgtcatgctcgctgttttgtctctcttgccgttaaaaattaagctgaattttatagcatttttttaactggcctgtcaggcagtggtgcgtttttctaccgctattgaggtaggtcaatttgcgaaggcggattattttgtggcaaacagatgttctttttgatttcgcgcaaaaagattcagaattttactgttagtttcctcgcgcagtaatacccctgaaaaaagaggaaagcaatggacgtcagtcgcagacaattttttaaaatctgcgcgggcggtatggctggaacaacagtagcggcattgggctttgccccgaagcaagcactggctcaggcgcgaaactacaaattattacgcgctaaagagatccgtaacacctgcacatactgttccgtaggttgcgggctattgatgtatagcctgggtgatggcgcaaaaaacgccagagaagcgatttatcacattgaaggtgacccggatcatccggtaagccgtggtgcgctgtgcccgaaaggggccggtttgctggattacgtcaacagtgaaaaccgtctgcgctacccggaatatcgtgcgccaggttctgacaaatggcagcgcattagctgggaagaagcattctcccgtattgcgaagctgatgaaagctgaccgtgacgctaactttattgaaaagaacgagcagggcgtaacggtaaaccgttggctttctaccggtatgctgtgtgcctccggtgccagcaacgaaaccgggatgctgacccagaaatttgcccgctccctcgggatgctggcggtagacaaccaggcgcgcgtctgacacggaccaacggtagcaagtcttgctccaacatttggtcgcggtgcgatgaccaaccactgggtggatatcaaaaacgctaacgtcgtgatggtgatgggcggtaacgctgctgaagcgcatcccgtcggtttccgctgggcgatggaagcgaaaaacaacaacgacgcaaccttgatcgttgtcgatccccgttttacgcgtaccgcttctgtggcggatatttacgcgcctattcgttccggtacggacattacgttcctgtctggcgttttgcgctacctgatcgaaaacaacaaaatcaacgccgaatacgttaagcattacaccaacgccagcctgctggtgcgtgatgattttgctttcgaagacggtctgttcagcggctacgacgctgaaaaacgtcaatacgataaaagctcctggaactatcagctcgatgaaaacggctatgcgaaacgcgatgaaacactgactcatccgcgctgtgtgtggaacctgctgaaagagcacgtttcccgctacacgccggacgtcgttgaaaacatctgcggtacgccaaaagccgacttcctgaaagtgtgtgaagtgctggcctccaccagcgcaccggatcgcacaaccaccttcctgtacgcgctgggctggacgcagcacactgtgggtgcgcagaacatccgtactatggcgatgatccagttgctgctcggtaacatgggtatggccggtggcggcgtgaacgcattgcgtggtcactccaacattcagggcttgactgacttaggcctgctctctaccagcctgccaggttatctgacgctgccgagtgaaaaacaggttgatttgcagagctatctggaagcgaacacgccgaaagcgacgctggctgatcaggtgaactactggagcaactatccgaagttcttcgttagcctgatgaaatctttctatggcgatgccgcgcagaaagagaacaactggggctatgactggctgccgaagtgggaccagacctacgacgtcatcaagtatttcaacatgatggatgaaggcaaagtcaccggttatttctgccagggctttaacccggttgcgtccttcccggacaaaaacaaagtggtgagctgcctgagcaagctgaagtacatggtggttatcgatccgctggtgactgaaacctctaccttctggcagaaccacggtgagagcaacgatgtcgatccggcgtctattcagactgaagtattccgtctgcctagcacctgctttgctgaagaagatggttctatcgctaactccggtcgctggttgcagtggcactggaaaggtcaggacgcgccgggcgaagcgcgtaacgacggtgaaattctggcgggtatctaccatcatctgcgcgagctgtaccagtccgaaggtggtaaaggcgtagaaccgctgatgaagatgagctggaactacaagcagccgcacgaaccgcaatctgacgaagtggctaaagagaacaacggctacgcgctggaagatctctatgacgctaatggcgtgcttattgcgaagaaaggtcagttgctgagtagctttgcgcatctgcgtgatgacggtacaaccgcatcttcttgctggatctacaccggtagctggacagagcagggcaaccagatggctaaccgcgataactccgacccgtccggtctggggaatacgctgggatgggcctgggcgtggccgctcaaccgtcgcgtgctgtacaaccgtgctagcgcggatatcaacggtaaaccgtgggatccgaaacggatgctgatccagtggaacggcagcaagtggacgggtaacgatattcctgacttcggcaatgccgcaccgggtacgccaaccgggccgtttatcatgcagccggaagggatgggacgcctgtttgccatcaacaaaatggcggaaggtccgttcccggaacactacgagccgattgaaacgccgctgggcactaacccgctgcatccgaacgtggtgtctaacccggttgttcgtctgtatgaacaagacgcgctgcggatgggtaaaaaagagcagttcccgtatgtgggtacgacctatcgtctgaccgagcacttccacacctggaccaagcacgcattgctcaacgcaattgctcagccggaacagtttgtggaaatcagcgaaacgctggcggcggcgaaaggcattaataatggcgatcgtgtcactgtctccagcaagcgtggctttatccgcgcggtggctgtggtaacgcgtcgtctgaaaccgctgaatgtaaatggtcagcaggttgaaacggtgggtattccaatccactggggctttgagggtgtcgcgcgtaaaggttatatcgctaacactctgacgccgaatgtcggtgatgcaaacagccaaacgccggaatataaagcgttcttagtcaacatcgagaaggcgtaagggggcgaacagatggctatggaaacgcaggacattatcaaaaggtccgcaactaactccatcacgccgccttctcaggtgcgtgattacaaagcagaagtcgcaaaacttatcgacgtttccacctgtatcggctgtaaagcctgtcaggtggcgtgtagcgagtggaacgacatccgtgatgaagtggggcactgcgtcggggtttacgataaccccgccgatctgagcgccaagtcctggacggtgatgcgctttagcgaaaccgaacagaacggcaagctggagtggctgatccgtaaagacggctgtatgcactgtgaagatcccggctgcctgaaggcgtgcccgtctgctggtgcaatcattcagtacgctaacgggattgtcgatttccagagcgaaaactgcatcggctgtggttactgcattgccgggtgtccgtttaatattccgcgcctcaacaaagaggataaccgggtatataaatgcacgctctgcgtcgatcgcgtcagcgtcggccaggaaccggcttgtgtgaaaacctgtccgaccggggctatccacttcggcaccaagaaggagatgctggagctggcggaacagcgcgtggcgaaactgaaagcgcgtggttacgaacatgctggcgtctacaacccggaaggggtcggtggtacgcacgttatgtacgtgctgcatcacgccgatcagccggagctgtatcacggtctgccgaaagatccgaagatcgacaccagcgtaagcctgtggaaaggcgcgttgaaaccgctggcagcggctggctttattgccacttttgccgggttgattttccactacatcggtattggcccgaataaggaagtggacgatgacgaggaggatcatcatgagtaagagcaaaatgattgtgcgcaccaaatttattgatcgcgcctgtcactggaccgtggtgatttgcttcttcctggtggcgctgtccgggattagcttcttcttcccgacgctgcaatggctgacgcaaaccttcggtacgccgcagatgggacgcattttgcacccgttcttcggcattgcgattttcgtcgcactgatgtttatgtttgtgcgttttgtgcatcacaacatcccggataagaaagatattccgtggctgttgaacattgtcgaagtattgaaaggcaatgagcataaagtggcggatgtcggtaagtacaacgccgggcaaaagatgatgttctggagcatcatgagcatgattttcgtgctgctggtgaccggggtgattatctggcgtccgtactttgcgcagtacttcccgatgcaggttgttcgctacagcctgctgatccacgcggctgcgggtatcatcctgatccacgccatcctgatccatatgtatatggcattttgggtgaaaggaagcattaaagggatgatcgaagggaaggtaagtcgtcgctgggcgaagaaacaccatccgcgctggtatcgtgaaatcgagaaggcagaagcgaaaaaagagagtgaagaagggatataatctcttttgaactttaagctgaaaatggcgctgtaaaaggcgccattttcatattgtagacaacgtaggctttgttcatgccggatgcggcgtgaacgccttatccggcatgaaaacccttcaaatccaatagattgcagtgaacgtgtaggcctgataagcgtagcgcatcaggcaatgttgcgtttgtcatcagtttcaaatggcgctgtaaaaggcgtcattttcatattgtagacaacgtaggctttgttcatgccggatgcggcgtgaacgccttatccggcatgaaaacccttcaaatccaatagattgcagtgaacgtgtaggcctgataagcgtagcgcatcaggcaatgttgcgtttgtcatcagttctaaatggcgctttataaagtgccatttttttattgcgtaaccagacggcgtaatcggctcacatccactgttttttctgcctctgccagactccaggcgttttgcagattcagccacatttgcgggctactgccgatcaccacggaaagtttaatcgccatttctggcgtcaaagctgcttttcctgtcagcaatcggcttgccgtactgggagcaatttccattgctctggcaaactcgcgcaggctgacattaagttcgtccagactttcctgaataatgtcccccgggcggggatgattggccattttcattagtgtctttactctcagtagcgttccttcactgggaacactatcattattgttccttcctacgcaacaataatccatttagccatttcatgttggagagtgtgcgatgctgcgacccgaacatggcagtcgcagcaaaggcctcttagtgacggaaatcaatcaccatgcggccacggattttgccttcttccatctcagtaaagatggtgttgatgtccgctaacggacgcagggcgactttcggcaccactttaccttcggcggcaaactggaaggcttcagttaaatcctggcgcgtgccgaccaggctaccgaccacttcaataccatccagcacaagacgtgggatatccaggctcatagactccggcggtagaccgacagccacaacacgaccgcctgcacggacagcatcaactgcgctgttaaacgcagctttagctaccgctgttaccaccgcagcgtgagcgccaccagttttctcctgcacaattttggcggcgtcttcggtgtgactgttaatcgctaaatctgcgcccatttcggttgccagttttaactgctcatcattgacatcaatggcgatcactttggcgttaaagacattcttcgcgtattgcagggcgaggttacccagaccgccaagaccgtagatagcaatccactgccctggacgaattttactcagcttaacggctttgtaggtggtgactcccgcacaggtaatgctgctggccgccgcgctgtccagaccatctggcacttttaccgcgtaatcggcgaccacgatgcactcttccgccatcccgccatcaacgctgtatccggcatttttaacactacggcagagcgtttcgttaccactgttacagtattcgcaatgaccgcatccttcgtagaaccacgccacgctggcacgatcgcctggttttaaactggtgacacctggacccacttctgccaccacaccgatgccttcatggcccagaattacgccggttttgtcaccaaaatcgccattcttaacatgaagatcggtatgacatacaccacaacactccattttcagcagggcttcgccatgtttcagactgcgcagtgttttatacgtaacgtcaacatgatgatccttcgtaacaactgcagccttcatagttcctccttttcggatgatgttctgcatagcaggtgaggcaaatgagatttattcgccactacccagtatggatgagatctgaaaaagggagagggaaatagcccggtagccttcactaccgggcgcaggcttagatggaggtacggcggtagtcgcggtattcggcttgccagaaattatcgtcaatggcctgttgcagggcttcggcagaggttttcaccgccacgccttgctgctgcgccattttgccaaccgcaaacgcaattgcgcgggagactttctgaatatctttcagttccggcagtaccataccttcgccgttcagcaccaatggactatactgcgccagcgtttcacttgcgctcatcagcatctcatcggtgatacgactcgcgccggaagcaataacacccaggccgatgcccgggaaaataaaggcgttgttacactgggcgatagggtagattttatctttccataccactggattaaacgggctgcccgtggcgaccagcgcgttaccttcggtccaggcgataatgtcctgcggtgtggcttccacgcgactcgtcgggttagacagcggcatcacgatcggacgcggacagtgtttatgcatctcacggatgatctcttccgtaaacagcccggtctgtccactgacgccaatcagaatatctggttttacattgcgcaccacatccagcagactcagcacatcgctgtcggtatcccagtcactgaggttttcgcgcttctgcaccagtttggtctggaaaggcagcaggttcggcatcttgtcagtcagcaagccaaagcgatcgaccataaagactttctgccgcgccgcttcctcgcttaatccttcgcgctgggtctgggagatgatcatttcggcaatgccgcatcccgcactacctgcgccaaggaagacgatttttttctcgcttaactgaccacctgccgcgcggcttgctgcgatcagtgtgccgactgttaccgccgcagtgccctgaatgtcatcgttaaaagaacaaatttcattgcgatagcggttaagtaacggcatcgcatttttttgagcaaagtcttcaaactgcaacagcacgtctggccagcgttgtttcacagcctggataaattcatcaacgaattcatagtattcgtcgtcagtgatacgcggattacgccagcccatatacagcggatcgttaagcagctgttggttgttcgttccgacatccagcaccaccggaagggtatacgccgggctgatgccgccacaggcggtatagaggctcagtttaccgatcggaatgcccatcccgccgatgccctggtcaccaagccccagaatgcgttcaccgtcagtcaccacaatcactttaatattatggttcggcacgttttgcagaatatcgtccatattgtgccggttctggtaagagataaacacgccgcgactacggcggtagatctcagaaaaacgctcacaggctgcgccgacggttggggtataaataacaggcatcatctcatcaagatgattgtttaccagacggtagaagagggtttcgttagtgtcctggatgttacgcaggtagatgtgtttgtcgatttcggttttgaatccctgatactggatccatgctcgttccgcttgttcttcgatggtttcgaccacttccggcagtaaccccagcaggttgaagttacggcgttcttccatgctgaaggcactgcctttattcaacaacggaaattccagcagtacagggccagcgtaagggatataaaggctacgctgtttttttgtttttggttccatgtcactcactcttttttgaatatccatccctggggggcttttatcgtctttgctttaccgccagggcgtcggcctcaagtataaagcagataaaaacaaaaacaccattgcgcaggcaatggtgtttaatcgtcattgaggactgatggttatgaattacttttcagcggggcgttttctgccggttgggttatttactacgctggatttgtcaccttcggtaactattttgcgctggttagaaattttatggtccagtccaagaatatgacgtgcctgacggttgcttttcattttaactcctcaatcctgtagctagttttaaggacaacatcgccgtagcgaagaaacacgtgctaaacccctaaattaggttgccgatcaagcatagcaccttaaagcgtagggtgctggccactgaccacataattgatcgtttgctggtagatatcactgaggatgtcgttatcagaagcttcaacccatttggtcagctccatgagaatgtcatcttcagtgacaacaccatgctgtgcccgaaggccttgctcaatggcattaaccagagcgggttctgctgtactattttctgcctgataataagtaaacatagtgattctccgtgtctgtgtatttatggtgtctgctacggatcgcagatttataaagcacattcagcatggcaaatatttgccgcttcgttgttaagattagtcctggttgatgatttttatattttaacaccatgatattcatagggattgtgattggtatgatccgattaatattgatacaatatcttttgggttatatattcccggtaatctattgtgggaatttaatttaagtgcagaagtaatattttcgccggattttattcggaatatcctgcttatcctcgtgctgtttctcacgtagtctataatttcctttttaagcccacaggagagcaacaatgacaatccataagaaaggtcaggcacactgggaaggcgatatcaaacgcgggaagggaacagtatccaccgagagtggcgtgctgaaccaacagccgtatggatttaacacgcgttttgaaggcgaaaaaggaaccaaccctgaagaactgattggcgcagcgcatgccgcatgtttcagtatggcgcttagtttaatgctgggggaagcgggattcacgccaacaagcattgataccaccgccgatgtgagcctggataaagtggatgccggttttgcgattacgaaaatcgcactgaagagtgaagttgcggtgccgggtattgatgcctctacctttgacggcataatccagaaagcaaaagcaggatgcccggtctctcaggtactgaaagcggaaattacgctggattaccagttgaaaagctaaagcattgccggatgacgcgtcaggcgcgtgaatgcctgatgcgttgttagcatctttacagcgcccgccagcaccggagctcacgtccgtcctcccttattgctaaactttgccggacttcacatccgtgggttgccagcgggcaacgttcgtagaaaaaacagccttgcggcaacgtgcggtttcccggcagatccgttttacgtaatgcccattcttcctccagcggtttatcaatggcggggagggaatccagcaataatcgggtgtatggatgtgcaggtgccgtcagcacctgctgcgcgtcgcccagttctacaatctgcccgagatacatcaccgccacccgatcgctcatatgacgtatcacgctgacattgtgactaatcagcacataggtcagcccgtgattttcctgtagcgttaccagtaaattgaggatctgcgcctgaacggagatatccagcgcagaggttggctcatcaagcacaatcacgtcaggctggctagagagtgctctggcaatggcgatacgttgccgctgcccgccggagaacgcatgaggcaggcggtcgagatactccggacgaatacccacctgcacagccaactcctctgccaacgctcgccgctgttgttcactactacgcttagctatccagagcggttctgtgatgatgcgccacaccggtaagcgcggattaaggctagagagcgggtcctgaaacaccatctgcataatgcgttgactgccagaacggatgtactgcccgtggctcggttgcagcatacccattaaaagctgtgcgagggtgcttttgccgcagccactctcgccgacgatccctaaggtttcaccacggcggatctgtaaatcaataccattaatggcatgaacatgttccgtagttttaccaagccagtttttacgggccgggaaattgatatggacgtcgcgtaacgttaataacgtgtcagacacttataacctcctgctgcggataccaacaggcacagcgctggttgttgtcaccacacgctgtcagcgccgggacgttttcacactgtgcacctgccgcatagcaacgatcgcgaaaagcgcagccgtcaggcaaatgggtgaggtttggtaccgtccctggaatggcgggtaatagctggcgtggtactccatgttctggtgcgcattgcagcaaaccaatggtatacggatgccggggatgatggataacgtctgccgtcacgccgctttcaattacgcttccggcatacatcacgtaaacgctatcgcacagttggctcaccacggccatatcatggctgatgaacagaaccgcagttccactggcgcgggctttatgtttaagcaaacgcagtacctgcaactgcaccgtgacgtccagcgccgtagtcggttcgtcggcaataatcaattgcggctcgcaggagaatgccagcgcaatcattacccgctggcgcataccaccactaagctcaaacggatagcggctcataacttccacggcatccgggatttgcatctcttccagcaggtcaatcgctttagctctggcttcccgacgacttattggttgatgatggcggatcacgtccatcatctgaagacctattcgacgtgtcggattgaggtcggtcatcggttcctgaaagatcatcgccactcgtgcgccgcgccactgacgaagctgtttttcccgcgcgttaagaacatcttctcccagcagggaaatctgcccccgatgtacgcaataactgcccgtcggtagcagacgcataatcagcattgcggtgacacttttaccactgccggattctcccaccagaccgacaatttcaccgcggttaatctgcaaggacacattgttgagcgcgtgaacatcaccgttaaaaccggggaaactcaaatgcagttgttgaatgtccagaacgggttgggtcatgactgctttcctcctgctttttagttcaactctgctttcctcctgctttcgggtcaagcagatcgcgaataccatcaccaaagagattaaacccgacggcggtaagcaaaatcgctgcccccggaaatgcgcaataccaccactgatcgagtacatagttgcgaccatttgctaccatcgcgccccattcagcactcggttgttgagcacccaggccaataaatcccaacgtggcggccattaaaatcgcgctaccgatatccaggcttgcctgcacgatcagcggcggtagggagttacgtaaaatatgccagttgatcagatgccaacgagacgcgccaaaggttttcgccgcctgaacataggtatactggcgtacaactaatgcttgcccccgcgccaggcgcacataaaagggaattcgcacaatagcaatagccagcatggcgttaaacaaactcggcccgagagcggcagccagtgccattgtcagtaccaagctaggaatgctcagcataatgtccatgatgcgcatgatgatggcgtctgcgcgtccaccaagcacaccggatagacatccgagtaggctaccaatcatacccgcaatggcaaccacgactaatccggcgagaatactttgctgactgccgaccagtacgcggctaaacagatcgcgtcccacttcatcggtgccaaaccagtgcgccgcagaaggcggcaaaaggcgggcggttaaatcaatggcgttgggatcatgcgtcgccagccacggactaaaaatcatcatcaatagcattaatacaatgatgactgcgctggtcacggtgagcggactgcctttcagcatccataccagttttgcaccgttaaatcgcgtttgtttttgtgggcgtacggcggacgtttcctcgcttagcatcattcaccacctccacgtccgatacgcggatcaatccacaaatagagcaaatccaccaccaggttgaccagcacataagcaaaactaaccacgacggcaaagcccatcactgccgggaagtcgagcgcctgtatacttgttactacccatgcacccattccgggccaggcaaaaacggtttcggtgagcactgcgccatacaacaaatcgcccagcgccaaacccaatacggtaatgcttgggatcaacgcattgggtagcgcataacataaaacgatataccagccgggcaagccgctggcccgggcggtacgaatgtagtcttcactcaattgttccagcatcgcactgcggatctggcgagcgacaattcccaggtgaacgaacgccagcgttaatgccggtaagatgagatgttgcaacgcattgaagaagacttcaccgttgccttcaagcagcgcatcgagcagataaaagccggtaacgtgcgttggtggatccagccagtcatcaagccttccgccgccgggaagaatttgcagatgaccataaaacagcacaatgacgcccagcccaagccagaacgcaggtgtggagattccggtaatggccattattcgcaccagatgatccagccagcgatttcgccagactgcagagagtatgcccagcgggatgccaatcaggagtgccagcagcagggcaccaaaagccagctccagcgtcgccgggaaaaatatacgcaactcttccagcaccggacgcccggtacgaatggatgttcccaggtcaccatgaaacaggtcgctgacgtagcggtaaaactgtacatacagtggctggtccagtcccagttgctggcgaatattttccacgatagcatcgctggcgcggtcacccgccagtaaccgcgccggatcaccagggatcagatggctgataataaacgtaatcacgcagacgcccgccaccacgagcaccagcccccagcagcgttggcgtaaaatactccagaaggtcacgttatttactcatggtattgatattgaagacctgttccagcatgggattgaacacaaagcctttcacctctttgttcatcgccagttggtagtttttctggaacaggtacacataagcagcgtcatcaatgacgattttctgtgcctgctggtagtcccgggtacgctgcgtctggtcggtggtcgcaagcgcattgcgcagtaacttatcgacctcactgttttcatagaagctgcggttacccggcagaccttttttgtcactctcaaaccagtaattcataaacatatacgggtcggcaaaatccggactccagttgccaatcgcaatgtcgtaatcacctttacccactctgtcgcgcatggtggcgttcgccagcttttccagcttcacaatgatgcccagcttgttgagactggattgtgtcgccagagcaataggctcccagttcggatcgttatcggagtagagaaacgtcaggctggtgggtttgctcgtcactttatcccattcggctttggctttcgtttcgtcatggttgtattgcattgccgtcgcatcgtagccccacatgccttccggaatcgggccgcgcatctgttttccgttaccactcagaatgccgttaaccatgccctgataatcggtagaccaggaaatggcccgacgcagatccgcctgattaagaggcgctttgctgttattcagatacagataggtaacgcgcagactcggatactctgccacattgactttattttcctgcttcagggcgttgagttgatccaccggcagcgcatcggcaatgtcaatgtcgccacgggagagctgcaggcgacgggaggcactttcaccaataatttttacgcttacccgtttgaagttcggtttattgcctgggtaatgcggatttggcaccagaactaattgctgacctttttgccagcttttcagcataaatggtccggaaccggcggtattttgcgcgaggaagccgcgagcatcatccgctgcatgttcctttaagaccgccggattgataatggatgcaccgtcattcgccagcgtgtagaggaacggtgcgaatggttggctaagggtaaacttcaccgtatgttcgtcgggagcatcaatctttaaatctttgggaaatgcttctgctggcccctggccgatttttagtagccgctcaaaagaaagttttactgcttcggcagtgacaggtgtgccatcggcaaatttagcattatctttcagggtgaacgtccactctttttgatcgtcagacgctttccagctacttgccagatcgccttcaacgtcggtactgcctttatcaccgtccgttttgtactgaaccagccgctgataagacgggtaggtcactgtccagtcgttattatctattgttaccgccgggtcgagggtttgtggatcggcggccttaccaatcaccagcatatcttttggtacggcggcgtgcgcaaccgggaaatttgtggcaaggacgagcgcgagcaatgtgggacgaaagcttatgcttctcttcatgacagtttcctgattaactgacgtgctgtgtgccaggggatataaaacaagagaattgatcagcgagcagagggtaactcgctgcctggggtaattcgaagtgccaccattcgctggagataccgacaaaaccgccaccagtcattatcgcattcagcaacagccgattgcgctgagcggcgggcgggacggaagggtgataggcatgggagcgctcgtgcatttcatcgaaccctgcgcccatatcgaggatgttcccgtgctcatcacgaagcgtcaggtcgatcgccgtgccacggctgtgattagaaccgaccgtcacatcaacaacatattgcgggtctgggcaggcttgccacaacatcgcctgtgcttgttgtgggcgatacgcatcgtaaatcaccagttgtaacccactcagctgggcgatgctgatacttttcgccagcgcggtaatcgcatccttgtgtaacagacaacgcgcttgctgataaatagctttacctgtgatgttatcagcgcaggcgtatttcaattcgatctccagatcagggaagattacggctaaatcaaccagttcggtggtatcgctcataaacggttcctgtataagacaaaaattgctgcgctttccgcttatgcagatctcatgccatgccgggataagcgccagaatgctggcttaaagttatattttttaacttttgatcaacatttgtgcagcgtagtgcagttttggtgcaagaggggaagttaaggaaggaatctcccggaatcgtagctgaaatcacagtatttaagtgacagtgtcacgttaaatgaaaacccgcgagtgcgggcgagaggaatttgtcagattttcagcggtaacacgctgctcatccagcctggaatttcttcggcgggtagggggcgggaaaagaaatatccctgaataacgcgacagtggatcttgcgtagcatctcaaattgctctttggtttcgacgccttccgccacgacggttaaattgaggctttgcccaatgctggtaatggcttcaagtaaggcaaggatgcgtttttcggtcagacaacgatcgacaaaacttttgtcaattttgatttccgttaccggaagactgactaagcgggataatccggaaaagcccgtaccaaaatcatctacgcttaagcccacgcccatatcacgcaggatctgaatgcgcttaaagatttcggtatcgtgttccatcatcatgctttccgtgatttctaccgtcagctggtggccgtcaataccccaggcgtgcattgcatcagacacctgattaggcagttgattactgcgaaagtgcagcgcgctcaagttcacggataacgccgggatatgaatattctggctacgccattctgctaactgacggcaagcttccgcgatgacccagcgcccaatattttcgatttcaccaatctcttctgcgagaggaataaaccgactagggggcacatgaccatgcaggggatcgtgccagcgagcaagggcttcgatgccgtacagttcacccgtttctgcgaagatttgcggctggtaaaccagtttcagttggttattgctaatcgcttctttcagcgctgcgcctaaaaccaaacgctcttttaccatttcgttcatcgccgggctgaagaactgccagccgttaccgccattcttgcgaatataatccattgcattgtgagcagtggagagcaagtaatcgcggtttttacccaggtcgtagctgatgccaatactcaaggtaagcgggaagggtttatcgtcaatcattatcggcttgctgaccacattccgtagctcatcggcgatttgggtaatgttactgacgtcgttttcgaggctcacgaggacaaactgcgtaccttcgatacgacagagatactgatccggtttgagtttttcacgaaagcgattgaccacttccagcaatgcctgatcggcccacgcatagccaaggctatcaatcacatcctgaatatggtcaacaccgatgagatacaccacgggagagacggctttgtcgaccaggtcatcgaggtaattgtgcaggttattgcgatttggcagaccggtcatcggatcaaattggatgagttgttcaatatgctgacggcttttttcctgttccagcgccagcgcggccatatgctggctgatatctgccacgcgttcgataaaggcgctggtttctgctccactgctggttttaatttgcaggatccccgcaggcgcgccatcacgctgacgaatggtcgcactccagctttgcgcattttgaatttctgcaccgtgggaagaactcgcccagtgtatcggcatcccgttgcgcagtgcgaacaggctaacatggctttcgttgagtacagattcgatgttacgacaaatgatttcccccatttcatgaaatggcgggctgctgcacatggcggcgagaatattgccttcaagctggcgaatctgccgttcttcggtgatatcgctgaaagtcattaccaggttctgcagatgcgcgagcacgtcataaaccgggctgatagaggctttaatccagattttttcaccggtgcgcgtcaacagcagaaattcgtcctgatcgcgggcggttttccatagcaactgttgtaaacgaatgcggttatcggcagggaattcaggaatgttcaggagtgtatcgggctgcataccgctggcttcgctaatgcagtaaccaaacatttcggtaaatgcgcgattgcactgcacaatatggcgttccggatcgaggacaatcaccggtcggtcgagatggtcaacggcaataatcaattgtcgggtctgttctttttgcgccatttctacgctggcatcccgtaccagcgccaggtaataaactttcccctcggcgctcactttgcttagcgcaaaacgggtccagattttactgccgtcttttttctccagctgcagctcccgactcatcccctcaacacgcgctttaccgccttcacggttgtgacgaatgtattcaggatgcgcaggacgcaaatcccgcggaatcagcatatcaatgttattgccaatgacttcttcacgtttgtatccccagagcttctctgcggcggggttgaaaaacatcacttcatcattttcgttaattaacaccgcacccatcatattttgctcaagggcggggaaaaaaatgccatcggcggcattatccgcatcggttagcttcatgattacctctgcatcctggcgcatttaaagactggctttccagagttcaacacggtttctacctcgtcttttggcgatatacagagcttcatcggctatttgaatgaggcgctcatagtcaggatgaccattaaacatggcggcaccgatggaaagactgagggcaatatcttcgccgtttgcggctttcagtttggttttctccacccgactgcgaatacgttctgcggtacgtaacgtttcgttttcagaagcttcagtcaaaacaatgataaattcatcgcccccgtagcggaaaacataatcactactgcggacgttgtcataaaaggcctgagagactttacgcagaatttcatcaccagtgttatggccccacgtatcgttgatctctttgaatttatcaacgtcaataatcagcacactcagcggtgtaccggtccggttggcatgggcaatttcgcgtttgaagatagtcggtaggaaacggcggttaagtaatttcgtcagtacatccataccgacttcgtggcggcttacttcttcaaacaattcacgcagcaaggtaataatttggcttacggtatttcttatctgtaataaaaatttcacccgcagacttctgttattcaaatttctggtgttacgcatggtttgattgaaaataccgtcgaaatcctgaatcagacgggagatatggcctacttcggcaataccactaaaataatgtcgacctttatggttaaaccacaggccaaaatcagcctggcttaaaggcaaactactgcctaaatcagaatccagcaggattttatagataatatctatttcccaactaagtatactggctatttgccgttctttttcttcttcggcgttttccagtaagctgaagatacgatagttttcatcttccttactggcactactgtcactaaaggtaaacgcgcgagtcatcacttccatcgcgatatcaatactgttaatgctgaaatggtagacctgaagtttttctgcggcggaataatcgctagagaagatcaccggatagaggatttttttcagcacccgaaaccccatctcgacaatttctaccggaattcctatgcgggcatgcacttccgcgacggtatgctggatttgtattagcctttcgacatcgtcaacctgggcagaaagcacgttaataatccagcgttccatcgcactcttcaactgccgctcaacttgttcattactcaagaattcttcggcatgcgggtcgatgcggacaattcgataaaactcgatactcagataatgagcatgcgcaacggcaatttccgcggctttagcacgaatgggcggatctgcctgttcgacaagtccggtccactcatctttcattcttttaaaatacatctccataattcacacccttataaggctgggaaatcagacggaatcaaaatgaaacgcaacgtgcgagatcgactaactgcaccatattctcctgaaatatgaagatatactgaaaagaaataagcgatttaggacagtttcaatctacgctactgttcttcagaagagtatagcccatcgtaattatttttcggtgacagcgaatatcgtatggtttttcatattcatacatttttattagggatttatggctgtttaactaagtgtggttaatttgacttaagtaagcatgattattagtgggatagtttaagagggtaacaagccggtgggtaaagcaccggcttgttacaaagtaagaatgggagtttaactgccccagcgactttgcagatagctgaccgcttgttgagtctgcggtttattcagatagtcctcacggaacaagatggtgccgctaatttcgggcacagcatcgttaagatcgagctgctttttcagttccggtacgccgccgttaatcatccagtctggctctatcttactaggttcacccactttatagaaggcgataccgatatacaggcgggtcctggtcggtttaacgacatccgcccaccattttgccaacacgtcataacgcgcggcactccgactgaacggccagtaaatttggggagcaatgtaatccagcaatccttgttccacccatcgacgggtgtcagcgtaggattcgtcataggctgccgcgcctcgggtatcggaaccgagcggatcgtgacttcggttacgccacacgcctgccgggctaacaccaaattcgactcccggcttaatgcttttaatggtgtggcttacctttgcaattaactgctgagtattgttgcgccgccagtctgctttactcgcaaatgcgcctccgtatttacggtacgtttcgttatcatttagccgactacccggactctccgtatagaaatagtcgtcaaactgcacgccatctacgggatagcgggaaaccacttctgcgactatacttgtgatccagtcctgaacctcagggatgcccgggtcgaggacaaagcgatcgccagacgttctgatccagtcgcggtgttgcacatagacgctcgccggttgttgagacagagtgctattcagttccctgatagtaccgggcttcgtattaacgcttacgcgataggggttaaaccaggcgtgtactttcatcccacgcttgtgggcttcgtcgagcataaattgcagcggatcgtaacccggattttcaccaatcttaccggtcataagatcggaccacggcaaaattttgcttggccacagggcggtaccgtccggcttgacctggaaaaagaccgtgtttatgccgagacgttgcagatgatccagtttgtcgatcatcgcctgttgttgtacacgggcccggctggtggggttactaatgttaacgctggaaaccggtggccagtcgagccgagaaaccgtggccagccagatgccacgcatcggttgactgctttgttgcgtcgtggctggtggcttactacctgctggtggtgtcaccatggactctggaggcgtgcttttacaactacacagtaaaagtgccagtgcaactagtatcgctggtcttctaatcgttaatttcttgtttcgggagcagatatccatatgtgctggtttccggtaaacagatgtgcgctcattctcgtacttatccccgttaagtcaatacgacagcaagcacgaaaaagggagcgatgaattatcgctcccttgtcttataaccattcagacatggttagtgtttcttgtcattcatcacaatatagtgtggactacgtgcacgcgggtgcaggaagaagtgaccttttggtgcgttctgactgttgattggctccagagtgacgccggtatttgctttgcctttacgatcatgaacagcatagagaataaagggcagggcaagtaccaccaggaaactaacaaccagtaattcaacatacatatcggtagaatcaccctggatgttatccggcggcaggaaggaaacaataaacgccataatactagtcagcagaccgacaattgccacgaccagtttcacccctttaccaccagggatattaaatgtgcgttttaagtcaggatgtttaagaaccaacacaatgtagccaataaacagcatgaaataagcacacagataaatcaccaccgtcagcgccagtgcgatcaggaaggacatgttgttaccgccaccggtattggtgaggatgatcaacgcgatagacgtaatcaccagctggctaatgaccagcgttaccggtacgccatttttgttcattttagcgaatgccgctggcagcaggtttttctgcgctgttacatacatcccgcgagaaggaccaacaatccaggaggcgatttccgccagaacacccagcaacagcagtgcggagatcacgcgaaccgtccactcaatttctggtgccacatgggacatcagaacggtaaaggtttgcattacccctgcggagaggttgatttcattacccggaatgaccatcgcaatagacaaaccaccaacagagcttaagcagattgccgccaccatcagcagtaacatagccaacggatagtcgcgccctgggttgctcatttcattgacgtgggttgcggatgcttctacgcccatataactcaaaatgaaggcaacaaatactaccagggtgcccactttagagaagtcagggaagaaggtcttgctatccatttcgatagcaacgggggcaccggagtgcagataaatagccgctaatgcgatcaaaataaatgcaggtaacaggataccggcgaagaagccaactttagcaattcgcgccgtgtatttcgtgccaccaaactgcgttaatgccagcgcccaaagaatgatgagtgctgcaatagttttggtaatggggtcttcattcagcgctggccatttcaggatgtaggagagtgcccctaacacgaaatagagcatcggaataaaaccaatggcgatttgcagatagccaaaactgatcgctgcaaatccccatctcggccccagagtattacttacccaggcgaagacaccaccttcttcccagccgtcgacggtggccatttccgcagcacaaagtcccacgggaataaaccataaaatcccgcctaatagcaggaagaagactaaactaaagccgcttgttgcgaaggtagggtattcataaacagccattaccatgcttgccgttatggcaaagaatccaagtaatgtgagctgcttagctttacctgtctgtacacttgtagccatattatccccctaaaacggtattcctgtcggaaccgcacctgttttgttctgaagcgtattcagaacaatattttccgttgctaatgccagtgaacagactttggaaattgtcccgaaacgggttcgtttcgggacaccgttaccgttaaacgttatcaggtatgtttaaagctgttctgttgggcaataccctgcagtttcgggtgatcgctgagatatttcagggaggctttgtagtcttccagcaacagttcagcaaagtccatttcgaagccgcgacgacacataatgcgcatcaccacgatgtcggtggcttcaccgccgagagtgaaggccggaacctgccagccgcgcagacgcagacgttcagagaggtcatacagggtgtatcccggatcttcaccatctttcagtttgaagcaaaccgccgggatgccttcgtccgggcgacccgtacagatgaactcatacggccccagtttggcgatttcatccgccagataagcggcaacctggtaagaggcgttctgtactttggtatagccttcacgaccgaggcgcaggaattcatagtactgtgcaattacctgacccgccgggcgggagaagttgatggcaaaagtaccaatttgaccacccaggtagtcaacgttgaacaccagttcctgcggcagcgcttcttcgtcacgccagataacccagccgcagcccagcggagccagaccgaatttatggccactagcactgatgcttttcacacgcggcaggcggaagtcccagacgatatccggggcgacgaacggtgccaggaagccaccgctggcagcgtcgatgtgcatgtcgatgtcgataccggtatcggcctggaatttatccagcgcatcgtgcagcggttgtgggaactcatagttaccagtgtaggtcacgccgaaagtcggcaccacgccgatggtgttttcgtcacaggcttcaatcatgcgtttcgggtccataaacaactgaccggggcgcatagggatctcacgcagctccacatcccagtagcgggcgaatttatgccagcagatttgtaccggaccgcacaccaggtttggtttatccgttggtttgcctgcagcttccatacgcttgcgccaacgccatttcatcgccatcccgccgagcatacaggcctcggaagaaccaatggtgttggtgccaacggcctgaccatttttcggcgcaggcgcatgccacagatcggcaaccatatttacgcaacgcaggtcgatggctgcggattgcggatattcttctttgtcgatccagtttttgttaatggataaatccatcaatttgtggacattttcgtcgtcccaggtctggcagaaagtggccaggttctgacgagcgttgccatcaagatataattcgtcattgataatctggaatgcgacatcgtcgcgcatttcgtgcagcggaaaacgtttactttctgcgatagtggaaatagacttcgcaccaaaacgactatcgagtagttcgctccttaaatccgttacttgcttcttatccattttaaactccttaaaatgattggatcgcattaaaaaagtaggatttatcgataaagtaagcaagtgcaaaggactcgtgtttaaataacaaaatcctaatgttatttatcgtgagatattacgcgaataatattttttcattgaaaaacaatacaatatgaaattcttgggtggtggtaaggtgttttatgctgttatttttatgcgcattctgtgtctcctgaattatcacgtaaaaatcagaccttaaaatatcactattagtacttgattattattttgaacgcatttataaaattattacataaaaatagcgaatattgctaaaatccccgccaacgatgtgttgacggggctgttattattttggcaataatactccggtataagtatttaccggatgagaaagatattgtttaacggcagtgttaacattctctaccgtcatttgtttcaacaattgctcctgctcagtccatgctgcaggatcgtcatattgaataagactatttacaatagtgttcgctaattgttgaacgctacgctgttggatatcgaggctgcgctgaacgttttgctggtattcattcagttcttgctcactgatccctttagccagacgcttaaccatcacttcattcgctaacgttaacagttcatcatgtcgttctggttgacaagtaaaagccagcaaatgactgatatctttggcctgaggatcaacgctgaggcgagaagaaacgctgtatgctccagatgcctgttcacgaatattaacacgtagatcttttgccagtgcgacgttaaaagcatcgagcgccatacgcgtcggcagattaacaggtgtccgggaatcataacgcttccactgactaacctgtgccacaggttcattttgttcttttacagtaacgcttgcgttgtccgtcgcgcgagttaatggtttacctgcggctaatgggctatcagagtgtttgatacttcctaagtaacgcgtaattaacgccacgagtttgtcttctgcgacattaccgacaatgacaaacgtgatatccgctggagaactaaacaattggcgatcggcagccagcgcatctgcggcagtaaactgtgcaatctgattttcttgcagtaatttcgtgcggtcatcagcatagcgcgtctcatacatctgctgggcgaatttctccgctggacgctggtcgagcgttttcaacgcctgaatttgagcattttgtaggcttgcccaaatattatcgttaatcgtgctgtgggtgattcgctggttaatcaactgaaaaccaggttcagggttattagtccgcgcgctaacggagagcaacgtattcatgccactgactttactgctcatggttacgctattttccgcactccagcgtttcaggctggaagaggagagttcgccaacgccgcttccgctaactgctttatttgccagcgcgataagacttttttgctgcgcagggaaacttaaatcgcctttattgcttacggcaataatttgtagcttttgctcttcacccgcggattttgccagaataaccctggcaccattggaaagtgttaaacttgtcagattctccgccagcgtttctttgctgctaatttccgcctgtgggtctgcgtctactgttaagcttaaatttctgcctgggaagacgtaagccgccagctttttgttggcgtactccttttccagcgccaggatagccgcaggagacaatgcttttttggcggcaacctcattgtttaccatttgctcccaaaatgcgtcctggttctttcttaactgctgccatttttccgccagactttgcacggtaatttgctgccacagacgtttgctaagttgatatgtctcttccgggctcaagaacggcgtattatttaaactgctggatgccaggcgactggtcagcatacgtaaatcacgttcagcttgctgatcaaccgcatttttcagccaggtgaggcgggtagatttgacatcatcgagttcttcagcagaaaaaccatgctgatcaatggttgccaactctgccattaatgcattcgcagcatcctgcatattatcgtctcgtgcatttacacggaaaaacaggctctgataatcgggtgcaattttaacgctgcgcgcagtgccgccagaaatagtcttcaactcgccgctctgtatgcgttcctgcagacgttgattgaacagctgaactaacatgctccattcagcttgttcgataaagctttgctcatcgttcacttgtaccattggcaggcgataatagagtgcgatgccgttcacccggttttctttatcattaatgatattaaagcgcaggtggttttcggcttttgtcggccagacgcgattttcagctgctttgttagccggaagcttacttaaattatcctttatcagcgccagcgcttctttactgtcgatatcgccgaccacgataaaggtcatattatttggttgataccagcgttgataaaattggcgcaattgtgccggtgtgaccgtggcgacagtatccatcaggccgataggttcacggtctaaattacgggtatttgccagcaggaaagggcggcgcgcctgagaggtgcgccatttcgcatcctgatgggcacgccattcctcagtaattacgccacgttcagcgtctacttcgagtttttcaaaggttgcggcattactccattcactgaagattgccatcacttgttgcagattttgtttctgcgtagtcggcaaactcacctgatacaccgtttcgtcatagctggtataggcattaacatcgcgaccaaaacgcaggcccatactctcaaatgtttcgatgactttattacccggccatgtttttgtgccgttaaacatcatatgttctacaaaatgagccacgccgagctcattgtcttcttcctgcaaactaccggtatgaatttgcagccataaatttacctgatcctttggatgagcatgcggataaatcatatatcgcaagccattgtccagttgcccggtaattaacttttcatcctgcggtaaggcggcggcaatcagccgcccggggagcaacagagttgccactaacgtcagtaagaaacagaggtttctcataattatctccatgcgaaaaccgggcgaatttacccggttaagtaaaatccgaactattaaaatttcatgctgacatcaagccagaaagtacggccactggcgtaggtcgccacaccggtgttcgttgtatcaacagcggttttgctatccagtacattgagaatatcggcactgatcgtcaggttttgttgttgcagaaattgtggcgtccaggacaagcgggtgtcccaggtcaggctgctatccagtttttcgtcaacatactgcttgtaatcactatattcgctgatgtattgcgcatttgtcttaccaaggataatgcgagctttacgcgcttcttgccaggccagcgtattcgcccacactaacccgctcggttgatgcgtgaaatccatgtttaaggagatctttaatgggttattaaaatctgccactggaacgctatcgtaagagaccagattaccgttataaaccacctggttatcaccggtattgctctcctcataaccattgtttaagctcaagttgcccttgctcttgatatagctaaagacaatttgtgggttaatatctacctggcggatatgcaggggttcggccagttcaaaactgaggctgaagctatgcgttttggttttgccatcgttgttatattcagtaatggtggttttagtcgcgctgtcggtacgactgcttttgctgatttgatcatgcgcttcacggtaaacatagtttgcacgcgcaataacgttcttaccgattttctgctgcaatcccattgccagttcatcgttataaggcgttttcaaatcctgataacgcgtcagagttttattaccacttacgctttccgtccagctattgcggatatcacgtaatcccatatcaagaatattcccgccatagtaacggttataacctgctgtaatcatactggtttgattagcaaaaatatcccattccgtcataaagcgcggggagatattgtggttactcagatagttgtcatagtcataccgcacgccgggcattaaactcacattacgccagctaatgcgatccgccatatacagcgtgtagttgtcaattcccaggcggcctttacctttatggtaaatggtatggttagttttctttccggcagcattaatcacataggattcagactggttatggcgttcagtccacgcatcggaatagatgtattccgcgccgaagtagggttgatggctaacattacccacggcgaatttttgccagtccaggcgtgttttgaaggtgtaattatctacagcctgggaaatgtgtcctaatccgccacgggtgcaacgccctgtaatatcaccatatgtacaactaagttcggtgtaccagatgtcatgatcgtgacgggtataatcactaatatgatcccaaccaacggtggtacgcagtttggcccatgcgagctgcgtatccatatcccatgccagaccataggatttattacccatttcgcgatcagactgcgggaaggtgctggtattataatcacggctggagccggtatattttaaggttaaatcgtgggtaaagcggtcgctggcaaaccaggtaaatttgcttaatgcagtatcgataacgtttttatactgtgcccgaccggcgacaatgccgtcattgctaacataatccgcgcgggtgatatcagactggcggcggcttaaaccggcggtaacgccgaagttatcagcgagttcctgattaaagctcaaggtataaaagttctttttaaaatctggggagtaataagtacttccactagagccttgattaaatgcgctcttgttattctcatcgatatggcttgttaaccagtcgctacgcgtagtgcgataacccaatttcaccttgctatcatcagcgttgaagcgtttgatctttgcatcaattaccccgccattgaagcgaccaaattcaaccggcacaaaactgtcataaagcgtcacattgtccagtaagctgacatcaagataatacccctgactcatcccgctaatattggttgcactactggcatcggactcattcgctgggttcaggttattagttgcactaataccgtcaatcaaataggcattctggtaggggctcgcaccgtgaatagagattttctcagggcgaatatctccctggttcaagctggtactttgcgtactatccatgcgtaccgcagggttggttctcagcagatcgctgatattgccattcccggtcggtaaacgctcgatgctttcactggtgtaatgcgtgttgccgtttacgggtacagggacaggagcatagaccgtcatctcttcaaaaaaatgcatgtacatgtttttgtcatcgacggcctgcgccacatcagcgccacataaaatgacgccaggaataagaactcgcttcatttatttatatctccgtacagcagggcttttattgtttttataaaaccgcgctaatgtcacaaatatcatcggccaggttccagacaccgggttgatgtgtaaccataatgacgccgcttgtgggtagtttttcacgcactaaacgcagtaagcggatagcctcttgttcctcaagatgagaggtagtttcgtcaagaaatatccatttcggacgtcgtaaaattaatcgtgccagggcgatacgttgtttttcgccgctggaaagaatatctccccagcgatcgtggtcatgaatacgcgcagccaatttcccaagaccaacctgatgcagtacttcgctcaagcttttatcgtctacgggcaggggaagtgctttacaaataatctctttcagtaagccggttttgattaacggtgtttgactcacataccaactgtcagcaggagaagaaatatcacctttaaaccacggccagcagtgggataatgttttaagcagtgtggtttttcccgcgccagagtagcctttcagtaatagccatttgcctgggctaacatgaaagttcaggttctctaatatgatcttattatcaggcgtacgaatactcgcatcagccacttgtaccgcatgttggcaatttttaggcttattcgtagggcgctgttcagtgagttgatggaactcatacaagcgatcgataaccgcagccagttcagcaagttcgtcatatttataaataaaccagcttaaattgttgcttaccagcataaatgcctggcggcttttcatcagtccgcccagattgatctgcccgctaataaactgcggcaataacagaaagtagggaagaacgctaaggctgcggctataaatattctgccagtaatcaagccaccgctgacgattcattaaacgatgccagttctctttaatggtatgaaaattgtcgctcaactcctggcgttgtagagactcagcattgcttagcgcaatcagttctgcctgcttattatgctgcacaagatttgttcgaaatgtcgcttcgctacgttgtttttccacattaagcggacgaatacgtttacccaccttatgggtaaataaagttccaccgatcacaatgagcacgacggtatagaccatatacccctggatattccattctgttccaccaacagtgaaactgagcgtacccgcgctttcccaaagaataacggtaaaggtgatcagcatgctaagactctggatgaagccaaaactaagactgagcgttttgctgatcagtaagagaatgtcttcagcgatacgttggtcagggttatctgtatttttatgctcgccgtagatctgcgtgaagtagtagtttttatctgcaaaccaccgattaaggtagtaatctgttaaccattcgcgccagcgaatagtcagtagtttaattaaccatgttttgtttacggatattaatacaaagatccccagcagggcagggaaccaaaggacaagctgccaaagcttatcggtttctttctggcttagcgcattgaaaaaatcattattccagtcgtttaaccagacctgaattttaaccacgccaaggatcatggcgaggataataatgattaacaacacactagttttattattcttacgcagccaaaagggcttcaacagacagagatactttgctatcaacatacgaagcgtaatgggaatggttatcattagcgaaaattgattgtgccatccaatgattatctatggcaatgatttactgatgaaatttatttaagtatcatttaacaatatgaaatataaaggaatatttcattttcagtggttatggttatgctattgataatcaaggatattgctaatgccctgatgcataccacgtaagccaggattttcgcaagggaagatgatgatgacgaaacacccgacaggaatttatgtcgggtgccttgttaaggtcataagaaggaggctaagaatggagttaaaagagagcgttattaattattctccatttgttttgcaacatccataatgtggtaaagcggtactctgttcttagctaactctaccatggcgttcatataaggtaccatggtactaaaaaggattttataaccttcgcaaaaataagaaacagtctcattgtttactttagtaatacgatgcttaggacaaccgccattgcagataggtttatatgcacattgctgacatttcgctggaatccgttttttttgcgctgtcagttgtacactgttcatcgttttgagttcagatttattaatgtttccaattttgtactgtggatagacaaaatggtcgcattcgtaaatgtctccattactttcaacaaccagattatccttgcaggactcctggaaaatacaactggtatgcccattccccaaaaaacggctgacaaagctttcaaactgacggatgaaaatttcacccacatcgtttttaacccattgcataaaaatggtactcataaacttgccataagccgtgggaggcacagaaaaatcaatgatacggaatgtgttctcactatgaccactgaaatcaatattcggcgtcccggtttctagcaattcgataaattgcatatgtttactgccgatagattttaaaaaatgataaacctcaagagggtaatggacattaacgttattaatgacggttaacgtattaaactctacttgataacttttcagacgctcgatggctgctatcacttttgcaaaagtaccgttaccactattactgcgtctgtaacggtcatgtaactcctgggggccatcgatgctgataccaaccagaaattcatgttctttgagaaaggcacaccattcattattcaataaaatgccattcgtttgtaatgcattaaaaatacgtttttggcctgcatagcgttgttgatagtgaataactttacggaaaaaatccaggccagccagagtgggttcaccgccttgccaggtaaaatagacctgattgccagacgctgcgatatattgtttgatgaactctttcagagtgctgtcatccatccatttttcatgagtaaactggctctctttttcaaggtaaaaacagtaatcacatttgagattacattgaaaactggagggcttggctgtaacgtgcatcgctatctcgctcaataaggcggcggaaaaatccgccgcatgaaggtttagttatttcgcttcgcttagtgctttcttgatattgttaaacttctcctgatttacctcgctaagcggtggctggctgctgtcgataaactctcttaccacgccttgcatctctttaacgacctgcggattggcggcggcaaggttatctttttgctgtagatccgtcagtttgtagagacctaactgattgttttctactgtatagacaaggctataatcgttatttctcaccgtataagagaattggcttaagtcctcagtgttggggttatgcgggtaatcgtcactctgatggcgaacaaatttgtggtaattatcccagaatggaatattttcctcgtcaaaccagtgagaataagaggttatccaggtcagatttttatgtggctcgccttgtttcttatcttgcaaccagggcagcaaggaaacgccatccagcttaaggtcttttggaatgctgatatcggctgcatcaagagctgtcgggtagaaatccattgcggaaatcagcttgtcataattaccgggttgaagttttcctttccaccacataaacattggggtgtgagtaccgccaggataggtctgactcttatagcctttttgcgccccgttcagcggcagaggaccatcgataaccgcaccattatcggaggtaaagagaataattgtattgtcatactgtccgtttttcttcagttgttcgagaatgcgttttacaccctgatcaacagaataaacggaagcgtagtagttatctgctgtttgactaccggtattaaattgcttctgatattgatccggtgcaggattatcatttggcaggtgcggagcattataagccaggtaaagcataaaaggctggtcaagtgttttggcacgatcaacaacgccaattgcctcatcggttaactgatcgctgatataaccttttgcggggacacgttcacgatttttgaacagactaggggagttgtaatatgccgttcctgcagcgtggaatcccataaagtaatcaaagccacggttttgaggttgccattcttccgcagaaaatgtggtgaagttgtcatgatagtcacgcgtttgtttatcttccggtaccggcacattactgattttactcaagtgccatttacctactgctgcagtgtaataaccatgattctggaataattcaggcaagaaagtttctgttagcggaataccatcctgagcatcggtattggaatagacaccaaagcgggcgggagctcgaccggtcattattgcggcgcgggaggggccggaaacaccgtgtgccacatagccgttagtaaaacgtacgccttcatccattaaactaaggagcgtcggcgtacttttttgtgcagcttcaatggctttatctatccctattttgtaggtatcgacaacttcacgattttccattgtttttgggtcaaaagatcccttatcaaaaggaagttgtccataaccaagatcatccatggtcagtacgataatatttggctttcctttggtactgtattctgtcggcgtaaagtcactgaaagcaacgtttgttttggttgctttcagctttacatcatctgccgcatgagcagcaaatgcagccataccagatgccagtatcaaagatatgctggtacttacgacacttttctttaatgcagacttcataaatgttcctcttcttattgtacttaattccaaagtaattttacgaagagaaataagtggatgtaagtgaagttagtcacataaagagatagcagatttagctaaaaaaagggaaaaaacagtccataaagcgttgacattactttctgttctattaagtaatttctcgccgataaacaactaatttattgatatttaataaattattgcattttactgacaaaatgcagaattgagatcataaataatcatgcaacaggttatgcaagtgcataaatatgtgatggatgtcacttatttatttcaataaatatatcgcctaaaaacaacgcggggcagggaatggctgccccatttaattcttacgcagcgtgtgtggttgactactcgttagcaaataatcaaatagctaaagcattcatcgtgttgcccgtattcatacccgtgtgactttgacaacggtactccttagaaactctcttcggactgttgccgaaatgtttgcggaacgcataaataaaataagatgtactggcataaccacattgttcggcaattttattgacactaccttctacgcgtatcaaattttttgcgtgctgcattcttgcatctaaaagaatctgactgaatgtcgtttgctcttgcttaagttttttcttcaacaggctttcactgatgtacaggcagtcacaaatatctttcagcttccatgggtgcgccggcttcatgttgacaatatttctcactttcccagaaacggatagcacaccgttagttaatagtgtaatgaaacctttgcatgcggcaaaaatagacaggcaagaaaaaagcaaaagttcactaaaattatgatgattgcgttcttcgctgttgagataagcaatcatttcattaagcaatccagtcggtacattactagcacgtaaaaacttcgcaggaacaggcaccgtcactgtctggatgttagtgcattgtagatattttttaatggtattttcagtaaatccgatctctttaaaatgccgctcataaggttcaaaatgcgtacgaacagcgttatctaccatcaggatctcgccgtcagagaaggcgtaatctttatctaaaatgttagcgttgaaggcatgatgaataaatataacagaacaaacgaggctcattttatctccttaaaacaataaagtttttatcgatacttttttaacatttcatatttataatttgctgtttgttttcagccttgcaaactattgataatgaaatgtgtaagatctcttgcaatgcgacccatttctgaaatactcagctgatcaattgccgaaaaaatggctatcaacgtaagtgtcagtaataagacaaccacaattgcagacatgatttctttatagttgtctctttgcgtgattttgtttttcactgtggtcgcatgcatttcaaatatgtttatttagcggataacgttaaaaatcgttaatcagtatgcttaatataacaggctggagaaaagaggaaataggactggtgcttcagtactgagcggagtttcttacagctgtaggcagaagtttatatcttatagtatgtagtttaatttaatccatgtgagcaaattgcgaaataatagtcaatgaggaattcttctgctgtgcggatgacagcagaagaaatgagaagaggcattaattacttggttctaattcaaccggaatacttttatagccaggaatgccacttaatggatcgtggttatcaagtgttagcatgtgattgctttctggaaaataggtcaccagactgcggtcagccatagggtaaatgaccacttttaatctatccatgcggcgactgctgcgcttaccgtctggcgtaagcgcaataagattaactctttcgccgttttttacacggcaaattttagcttgtttagcactcataaagaccacatctcgttgaccgaatacccctcgatagcgatcatccataccataaatcgtcgtgttgtactgatcgtggctgcgtactgtcgccatgaccagcttactgttaaacgcactagagggatcttctaacagccctttgctggtaatgaaattagccttaccactcggcgtcatccagcgcctttcagcagctgcatttatcaggtgaaaaccaccgggatgacggatgcgctggttatagtcggcgaactctggcagcacagcttcaatgtcattgcgaatgcgatcataatcttccaccagatactcccaggctaccacgctctggggtagtgctgcctgcgcgattcccgcgaccactgcacactcacttttcagcattacaccggcgggttttaacacgccacggctggcatgaatcatgctcatactatcctcaacggttaccgcctgcgcaccgtttttttgcatgtcaatctcgctacgtcccaggaccggcagaatatagctatgccgtgcggtcaacagatgagagcggttaagcttagtggctacgtgtaccgccaaatctaattgcgttaacggtacagcgctcgcttcccgatctggcattgccagcgcaaaattgccccccatgcagatcaatgctcgagcctgccccgtacatattgcttgcatgctggcaattgcagcatgtccaggtgcatgaggtggggtgaagccatagcgctcacccagacgagccagaaactctgcagacggtttctcggtgataccgacggttcggtcgccctgtacattagagtgtccacgtagtgggcagatacccgcaccaggcttgccaatgttacctttcatcaacagcagattgaccagttgctgtacgttctgggtaccatgttcgtgctgagtgatccccattccgtaacagataatggtgcgttcggcagcggcatatgcgtcagccagttcggcgatttgtgtctgacttagtccagaaatacgttcgatatctttccactcggaattgagaacgtcacggcgtagctcgtcaaagccgacggtatgcgtttgaataaactcgtcatcaagcaaactaggccgacctgcggcgcttgcagcatcatcgcgctcaattaacaggcgcatcatccccttgagcaacgccatatcgccaccaatgcgcacgttatagtaggcactggccaactgagtctcagagttcgtcagcatttcaaacgggttttgcggtgcggtaaatcgctccaggccacgttcctgtagaggattgatggcgatcattttcgctccccgtttcactaaagcgcgcaagctagtcagcatgcgagggtggtttgtaccagggttatgcccaatgcaaatgactaaatcgcacttctcaaagtcttccagcaacacggtccctttacctacaccgatactcgctgccaaacccacgcttgtcggttcatggcacatgttggagcagtcgggaaagttattgctcccgtattcacgggcaaaaagctgataaagaaaggcagcttcattggaagtgcggccgctagtatagaattcaacctgattgggatcactatagctttgaaggcgtgcgccaatttcgtcgaaagcttgttgccagcttaatggcttgtaacagtcgctgacggcatcatatttcaaaggctgagtgagtcgccccgcagcctcaagctcgtggtctccccaggtaagtaaactttgaaccgtattctcagcaaagaaagaggcgtttacctgcttatccgtgacttcccaggcgattgcttttgcgccgttttcacaaatgtcgaaactcgcactgtgcttaggatctggccatgcacaacccggacagtcaaagccctctggcttattcatgtcaaacatggcaataacatcctggcgtatatccatctgcttacgtactgcattcgctacggatttaacagcaccccaaccacctgcagcaccctggtaggattcaatttttttcttcatctacttatcctgtgtggaaatgaattattaggatttgtaatagcgatgatgcacagtacatacaaagggattatcgccaacatggatatataagagtaggggactactctctttctatttttaatctattatcgttaaacaatagattaaatacgataagttaagcatcatctctcatagtgtttaaattaacatatttttcaatataaaaaataagactctggcttcaattgtgcgcggattttcttacaggtgtaggctaatagccttcacaaaataattatccgcgcaattttcgtgaatggagcgcatagactaaggtcaaaatcacaattattcatagataaaagtgacaccaatgacactctggacggttccggcactaaccttgtttcctgtttgtccataggttgcgcttaaacccagaggtactttgcttttatttactgtccccagggagacattttctcccgtagccagtatttttccattacgcattagagtgacacccactccgcttgcttttgttgcatcaggtgctgtgttagcaaacacttgtcggctactgtcagtggtggcaccgctaagataaaaactgagcttttgttcgctactgcaatatacgccaaggggtatttctgcgcttccaggaaagtccgggagatccacggtgacatttcgactatcaacggtgcagccgcctgttggcataacaacattgttattactaataatattccacgtaaaattacgcggatttccgcttcctaatgttgcaattttatacatatgaatacgggcaatgacttcccccgcttttatgacaactccaccggccgccccaactggggtaatatagagttttaacggtaatggcatcggtgtcttatcaccaatatccaatacgttggtatttgtcgtcaacgggaaggggtaggtcacattattccagtacaggcttcctttataactctgtagggagcctgcgaaagcactgccttgtaccaggtttatatgatcagtgtcgtaccagccgccgtaatcattccagcaacttatatgctgagacaagtctacaaccagattctggcccggctgtattacagggtcgagattaacataaacagaggttgtacctgctccaatactactcccgccatcgacattacaactgaaggcaaaaactttgcctgccattaatagaagataaataccgaacaggacctttatactgattgttttacccatgatatatcctaaggttaaaaattgatttaaaaagaaggctaagaaaatcgaatcgacgttattgccaggtgtagatcacattgattagcgcctcgatcgttccctggcttgcgtttccattcaccgtgatagctcttgccttaagtggaaactgtgcattacgagtgatctcatcaacaataaccgttttgctatcgccattttttaacgcagcatcctggtcatccctcagctctatctgaatattttcggcagtaccttcatttttgtaataacccgtattgtcagtactacctgtcacgattgccgtcactgcacttgtttcaaccggacaatcggttaaactcaaagtaatattgtgccagccagatgcagaaccaggttgttgcagattgcgcgtataaagatccccgagattaacgttagcttctttggtttgaatagtgcagggtttagcgactacccgaccattaacagtgatagtgacatcggcggcctggagagttgctgtgaataacgcgcaaaacgtagctaacaggaacctcttgtgaagtcttttcatatctgactctgattattgaaattcaagggtaaaggttgcgctagccctcaccagtcccggattgacggacttctgagtactcttcagacgagcggagtaaggcaaaatattgttctgttctggtaccagtgggatccactgcatcccggcatgaagatcattcagtttcaccggacgcatatttgcgtccaatatttctatacccaaaccggaggccgtattgcttccttcatccagtttcaacaaagtattattttctgcatcctcaataccgttaaatgcaacccgaacccccgttgtccctttgctgcattcacttaacgtaatctgaaaagggacggctggacttgtgctaccggtcgttggaaattgtctggcactgtttttttggagatctacggtaaaattaaggctatcgctactgactgtgcagccataatcgaggacgcgcccgctaattttaataacgctatctgcggataaagcagaataggtggttaaccccagacataaaccgaggaaaataatgttattgtatttcataatctattgttccttagcgacagattgctgtctgctggttcagtaaggtaccaggagaaacttcaggaagcttgtactcgacaatacagttactgtttttatctttgccccaactaacctgtaattgcccactctgtggaagtccagtcagataaacctgaccattttccgcgacaatgctgccatttttattctctccgtgtgtgacaattgcaccgaatggaacgctcttattaccgtacttcaacgtcattaatactttcccgccgatttgtgcattaaatgttgctctggcaatagcaccgtgagttgggatgacagtgaccacggtttcatccagttcaacattatctgcaagggaattcgcgttaagagcaacacggttttctctatattctgtcgcaaatggtaatatggcatagccacgccagtcggtatgaattccggtctggttctctattttgacattatcagcaccaggagccttaaccagaaccattgtgtcgcccagcggctgtccaaaggtgatgccatcagcatgagcaataatcccaccactcattccgtaataaatctggctgctgtcaccactccgactgtaaccgacattagtattaccataagctccacgataattaagagaactgtaaccactggtgccagagcttgtattacctccgtgggtgttaccgacctgaacgctataattcaggttattatccggcagcagagtgccataaaccccgcttagattggtcatgccgcctttcaaatcgttactcatactgtaactggcgttactattacgaaatgcgctctgactgtctgtacgcatccaatgactgaagggaacattaagcgtaaaagcgagtaaatgatcccgatcgttttgccatatattattggaatagctgtaattcaggctagtcgtaatatcaccaaacggcacatttaatccaaaacttatttgctggtcgctgcgactcgtgttccagtaactttggcgactggcactgaaaaatgtcgtaccgtaatttccaagctgctgagagatgcttatttgttcctgaccacgcttactgtagaacagattaaaataatcaataaattgtgtctgctcattggtgtctccggtaggaggcttgacggtgtaaccactcattcgactgtaggcactgtcggataagttataaaaaccttgcgtagaatagcgatatcctgcgacctggatattggttccacaacaagtttattgctgcacttgttgaagagagtatttgcaaaaacattttatgtcgctaaataacatgacgatttcattatgcatgttatttataaaccgtgactaaacagaatattattgcgaacaagggaagtgtcaggaaaggtcaagagctaccaatggttaatatggctataaatcattagctatggttaatgtttgcttgctgaaactaacaccgaattgctctaaacagataagtgcagggtttattaaagctgtccgacagactttcttaacctggtaatatctctcttgggtgactctccaaacatccgcgaatattcccgacactaatgggatagctttcgtaaccgacagcataggctgctgtggtgacatcgtaatgttcattcagcatctgtcgcctgacttcattgagacgtagccatttctgataccggagtggactcattcccgcttgatccgtccttaaataagtaacagcaccctctggtgttttcgtatgcagtgtctatgcgacagacactgcgctcttagcatggggcagggaataaccaggctatttctccatgcacaggccaattatgaaagaggagaggcttaagttcttgaaccctgaacgaataacgactaccagaaaagcacttcgcatcactcagacatgatttaacataatatacattatgcgcaccaatataaaccaaggaagaatccagtcgttggcggtcatgattgtcatgctcattaacaatgaccaaaccccatatctcacttactaccgtattctcggcttaaccgtccatgcaacctcaacacattgctttcaactgccgtcaccacgttctccggaaaatctgtcggtaaactagtcttcacgttatccagtgctgctggaatcattctggcaaagtcactcaggatttcatgcatctgcacttccgggaatctcagcacctttgctgtcgccaaaaaatgtcgcggataaattttatcgattgccgtttttttgcctttggatgcgttaagccccattgccagtttgagatcgctgatgtgtattcccgtaccgccaaggaccggaaatgcactaatgatgtcgtaaaatggcgtgagtcgataactgccgccagcctgaataaatacggagaagttttttgcatgaccgtccgttgcgccaatcaaccactggaagacctggaatttcataaaatcatagcgatctttcagcgcctcgctggaccccatcaaaaaagccatgatccgcgcgatgcctgggcctccatcactttcatatttcacgctactaggtaaaccgaatgtctgacacatatcctcctgtggcaagcgaagtaaaaccgttcgctcagcattccaacgcctgtcaaaacgttcgaccgctaacgcgcgcacatttcccgctttaatgatttctgcgtccggaacattcaacccaagttctttcgccagcagcagacagtaatactcattatcaacgctttggctgagatcgagcgtcgcattgggctgcctgatttcgccaatcggtaatttaatgatgtgcgtcgtcggcgttattcctttcggaatgcaccagtcattgcctattctgagcagtgctgtcttctcctgtgcgccagcaacgctgatgcgaaagtcattttcttctctaatcatgcctagcgggatatctgctttataagccgttaatacttcttcaagtctggcttcagtaagcttttcccatgccattatcggatgcgttacggtttcgtcttcgggtattaacgtcacggcaccaacgctgtctcgccctatttcactcaataaatcaaacggttgtctggatttggcatgataacgtttaacgatccggtcacgtacaatcgggctatcgggtaacaggttatcgaagaagttaaatacggcatcagaggtgatattccccctctgcaatggcaggctaagactcaacggtctggcataacggcttgctaaccactccggtgcatacttaaaggtgtgcgcgccgttggctaacttcgttaactcgcctacccgctggttgttcatccaagtgacaagtttaggcattaccactccagattttgctgttctgtactttctgggctggcatttttcgcgtcgcatagcgtcatactgagttcaaggctctgtaaaatcttaaaaaatgtcgtgagcgtggtattgtcagggttgttttcgaaattggaaatcgtcgcctgcttaataccaatttttttcgccagctcgctctgcgtccagccattttgctggcgaaccagtttcattgcattcgccaattgcgttgggctatagatcttctgaaagctcatcatgtcatacgtccacagcaagtttatccgcttaaggggatattataagttttatcctttagtgaggataagtcaatctggaaacacatcttatccgctctacgggataaacgctgcgatatccgcgatcgcggataaaaaggaggatttaaataaggcgttgatgcgccgtttgaagtcggcaatattaagccgcatgccatctcgacatgcggcttatacggtttaccagctatatttcactcccagcatgccctgagtatcgctatagcctttatcacctagttgcacaccgacattcccccacaggctaaggttgttatttactttcgcctcaaccccggtacgtacttcaccgagattacgcgcaccttcacggcctacggtttgaccattcatcttcacggcgtagactttgctattgttgatccagttcgcttcaatgtaaggctggaactcacgctgtttaccatcgtcacgctggtgatggctgttcaggtaggttttcaccccaagtcgcgtttgcacatttccgtcgccttccgtttcaatgcgcgttccgtctttccgggtatggtcggaatctttcacacccatccaggtgatttgcgcctgtggctggacgtaccaggtattcagcgtcccttcgctgccgctaaatgttcccgcttcaaaggtatacccaccctcaacagaggccgtcacaccgcgagaatcatagtcgtcagcagaacggttatcggaactgacgctgttatcaaaccagttatacagcgcccagctgtcaacataagcgccggtcttattcgcatcgttctgataccaggtcgcgtacagcccagcgctgtaaccgctgatgcgcccatcgcttttataacccacacgattactctgagtattactgtgctgattggcgtagcctgccatcacgccaagatgccagcgatcctgcgcgttgctactccactgcgccaaatcgccgcctagctgcaatacatagcggttagcctgagtatttagctgaccgtcaccggccctactacgttcgtgccctccgacatgacgcatccacatactgcttgcgctcccctgagaatgcagactatctgtatactgcggctcacccagacggtcgtgtaaacgatggctaaacaggctgttggctgcggcaatgttgctgatatagcttccggcctccgggcgataaacacttgggccttccggatccacaacagggggattattgatgggatcgggtgtatccgctggcgttacgccgtcccatttactggtcagataccagtttttctcgtcattccccttccctttagccagcgtgtagacgtaagccccagcttcgacagttccggtggtcagcgcgaagttacctgcagaattaccgccaacctcaatgagttcaataccgttgaccgtttgtgcaccgacgccgccaatgttatcaacccgaacgcgagtgttcccttgggtatcgcctttcacgttcatcttatcggtggggctattatcgccgcccagcgtcgcgttgaacgtcatcaggccattgtttccggtatagttgccgttaacggtcagtacattccccggtttccccccttcgctattcatttgaaccgtgccgccattctccaggttgccgccgatagtggttttagcgacacgcagtgccccccccaggcataacgttcatatcacctgcagtggtgacatttccgctcatcacaccgctgttatggatattaatgtgttgacttgccatattaatggcagagtcggaaccgaaagcaatttccccccccacgatatccgtcgtaccctgatatgccgcggaatcgttgttaagagtcaggatcccggtacccagttttgtcacatcaccgctaccgctgatactgtgcgtcatcgcccagctacgctcagtggagatggtgagcaggccattattgataacggaagcatcacccaggtttttctgctcgttgacgctgagcgcgctgcctgtatcaatgttgaattgccccacaaagcggctattatcgccatccaactctacatctgtcctggcggttgcgctcacgatacccttcccgcttatgctattacgcagttcgccagtcacgttttttagcgttaacagaccgtcattggcaatatttcctctgcctaacccctgagtattatcgaggctgacttccgcatttgggctaatgctggttaacgcattgtagcgtgcattaagcccctcgatagccagcgttccccctgtaacattcaggtttccgccacctgtcagttcaccctgactgatcccacctttatttaccgtcagcgccccctctttgaacaaaacagtgctacccatctgcccggtgaatgtctctaccgtctgcgtgcttccattaagatcgacgatggccgcgttgctgatgttcagttcccgggtgttgccaagtgcaccatccgcatcggtacgtaatgtccccatctgaacgtaggttgccccctgatagtcgttctgaccgttggaaaggctaacctgtcgcaccgtattgattgccagatccccttcaccaccgatttttgcgctcatatcggccgttgcgccataggctccgccatgttcggctaacgtcagcttttgcccaccatggatgttcagcgctttcagcccatagttaacgtacaaaccattacctggtgcggtcgtgaggcggaatccataatcaccctcggcgaccaccgttccgttttgcgcaatgtgtaacgttttgtccgcttccacctcgtcgccctgtaaatcacgtaacgttaaactgccaccgctcccaataaccgtttgcgccttcaccagttgaacgccgacatggctatcgtcgtgttccagcaaattgagcgtcgtcagagggttattcgccatgggatcattccacggtttaggcacgtcgataagcacgtcgcccgtcccgtttacctgatagttacggcctttccaggtgtagtcacccgcgccgacaaccagcgtatcgacgctgatatatccctccgcgagcgtcgcagcaggaatatccgtatcgaaaatgatggtacctccattcatggccagtccaccaatggattgctctccaacttttacgcttgtggtattttcactgtcagactgcaacatcgcgtgagtaagcgcagcggtgttgtcgcgttccagagtgaaggtactgtctttcagttgggcaacaccggcgaattcagtccctgttgcatgggtaaagccaaacatcttgtcggaggaactcagctgcactcgcatcaagccatcgcctttgagcgcattggtcagcgtgtaatctcctgcactgttcgtacttgcgagaatgtcgagcgtaccggggtttgcaatggttacttcactgctccccatgcccgttaccccatctgccgtatgagacgcaatggtcaggaggccgtcattgaccagcgttttaccgctataagtattccctgcattgaacaccgtatggcctgcatcatggatcacttttccgtctttatcgtcacctgtaatcagcatatcgacctggtagccggcatcactgttattggtatgattaaagacaaaaacgccttcgccaagaccaaactccactttcgtcgcattggtgataaatccggcatctgccgccgcctcaccgtgagcagcaccaatgtttagcgttcctacagcaggctcaaaaacacctaagtaaacttctccaccttcgacattcagcgtaccgttattcgtcagggttaacgtacccgtaccagatgtccctacgtacatattgaatgtttcaagaagagagttctgcccatccaccctcacgtcgcccttacttttgtcattgagagctatctgtgtatcacgcgctttaactatacctccggtggtaatattcagttcacccgtgcctaatacaccgacctgtagcaattgtgcgttagtagaacttgtctttaaattccagagactgtccgtactaatattaactatccccttaccggaggcatttcctccgataaatccatagcccgtactattaagggtggcaccattactgacatttacgataccgctaccaaaattaccgacattgatacccacagtatcgaagctacttgtcgcatccatcaggttcagtgtgccgataccgcttgctttatcgcccaaaaaagtaatattttggcttacgaacttaccgccatcgctaatattgaggtttccgacgcccgcaacaccaatggtggtatagacattcttattgacctcccacattccccccgtggtgatgctgacattcccgacgccggtttctccataaccgagactacttcctccgttgctgacaacaagcccctgattactgatattcatttcgccgtggccgtcataaccaagattagttccgagattagtgataacggagttcttatccttaacagtaatgttgcctgtgcctgtttctttcatccccgcagtgataattccgctatctactttgccttcactgctgacattaagttcaccgtcgccagcatcaccgatatagatatagcggaaagcttcgcccgttccgaggaaattccaatgccctttatcggtcacgttgacgacaccgtgggaaccgtcctgaacgcccaccaaactatattctttgttattaatcagtccattattggaaatattgactgtgccattaccgaaatatccattatagagtctgcgtaccgtgatgacagagtcttgatcctgcacattcagggttccgataccggtggcattgccaccgataatcgtattttcagccgtaaccaaccccccctcgcgaatagtcgcctccccagttccttgattaccaatttgaaattcaatactggaatcattattttttattagccactcgccacccttttcaacgacaacctggccattactgcccgcctgatagcctaaaatggcgacgatactactcgtgacgtaacccttatccgtaatatttaaactacctgtgccatagctacctatttcgaataattcggtcgtcagaacagagtcctctccctcaacattgaccgtcccgacgcctcctgtgctagaacctaatcttaaatagcctccatcgacgtgacccttctgtttaatattcagcgtccccgttccggattgacccacatttaaaggccttgcattatttccgctatcatacaatcgccaggtgccacccaaaacattaacggtgccctcactgtcctcattagcgccaatgacgctggtagtaatagtggttaaggaggcattaccgccagccaaaatattaagcactccagtgccataccagccaaccaggtaggcatcataagcaacatcagtatcaatattggtaatctgatcattatcaacttccagacttgcaccagacgcactaccgcttagtgccagcaaaacacccagcgtcaatctactgaatttcgttgtcagtccagaggatttacgcaaattaaccgtgcttgttttacctgccctgcgagttaattcgctgcaggcctgaaatacctgtagagtgcaattccatatcacgcgatagattctattcatataaacgctccatatacaaacaatacagccacgaaagagatgagtcgtcagacattaaaaatgaaacttattaaattgtcagaggtctgtattgagtgttagttggaggtgggaaggtgtcaatttggctaatttgctaatgctttcgaattgatagattaaaaattgcatagttcttattttatttaaatatgaactatgagttattgttgcttaataagaaaactgtttctttcaataggaaaattatcatcatcatatttaacaaagaatagcactaattgctaaaaatcgaagtttattaaaccccttttgcatccattagtgtctttaggaatattcgctataaaataagggttgtgcttaatgctttaagaaaaatagcaattttcccttgaatatcgtactggtgatggaacgatgaatctgcaagctggcttttaacaagccagctctaaaagaagggaaataagaataactatactcaaaaactaacagccacggtcatcatgatgtggctgtcaatgaaattataacccaggcgctttccataagctcgtcgtcagtccatgatcaaccagccccagctgatcctgataaactgcctgccacttatcgcgactatcctgataaagttcatgcttttccgggtctggtgtgtgcgtccgttcccagcgaaccaggcgttctccggtttctgccatactactaaaaattccggcaccgacgccagctgcaatggcacatcctaatgcagtggcttctttgaccaccggaatattgacgggtaatccgctgacatcagcgagaatttgactccataatttccctttactacctccgcctgcaaagactaagctactaggatgaatattgctgaaatcagcaatttgctgcaagttacacgcacttacaatcgccgcattttcttccagcgcacggaacaatgtcgctttgttacatttatccgggtcaatggacaagttaataaaggaaggcgcagcgtgataccaggttttaaagcgcattctgtcggagaagatcggcattacgccccagctcccaggcggcacccgactggccatctcttccagcagcgtataggtgtcgatgcctaaacgttcggcaatcagtttttcttcggcacagaaagcatcgcggaaccagcgcatggtgagtccggtaaaaaagcttatagattcagcttgtaccatgccaggaataacatgaggattaacgcgcacgttcatttctgggtctgtcaccggcgcggctaaatttacaacttgctgccagaatgtgccgccaagaaccgcggtttgtgccggacgcacaacgcctaacccaaggcaaccaagctgcacgtcgcctcctccaacgaccaccggagtgcccgccttcagaccgcagagttccgccgcttgactacttaccacgcccagcaatgtgccggtttctttgacaggagaaagaatatcggcacgtaggccagccatatccagcaatgcaggtttccagtcacgggtggttagatcaagaagtcccgtggtgccagcgttagagggatccaccgccagttcgccgctgagcatataggccagccagtcgctgatcatggtgatggtacttgcctgacggtaaatatcggaacgatggtgcgccagccaaagtaatctggggatggcacttaaagccagtgtttgtccggtcgcgcgataaacttcgttttcaaaggtattgttgtgcagttctttaagttcgctaacttcgcgtgccgctctggcatccacattggcgcaggcccagatcggggctccttcattattatataaaacaatgccttcacgcatgctacatgcgctaacggcagcgatatactccggggctatgccggcgttgtgcagcgcctggcgcatacactcacacgccagttgccagtttttgttgagatcaaattccatagaaccaggaacgtccggtactgccagatgccgccactccgcctgtcccactgctatttgattgccttccaggtcgaatatcacagcccgaatacttccggtgcctgcatccagcgccatcaggtagtacttactttcactaagggtaaagagtcgagccattagattatcctcggcttatgcgttctgtctgttcctctatacgttctccatcattcccggtaataaggtcatgcaaatttaactacgtaaaatcgccgctgctgtgtcctgatcggtaaccagtgcgttgatataaccgcctttcattgcagcggcaattgcttcggctttattttctccccctgccacgccaacccggacgggtatggtcttcagcgcgcttaaaggtaagccaatcagttcgttatgtattttgatattcgtgacaacgtcaccttttgcatcaaaaaagtagcctaaaatgtcgccaaccgccccttttcggccaatcattaactgttcgccctggctgatataaccggagcgaatgattgtcgcatcgtcctgttgactcacagcaccaatgccgacaatcgccacatccgctgcttgcgcggctaacagaacatctttgacgcaattttcattttttagcgtacgggcaatgtcagcggaggatgcccgcaacggagccggaataatattcacactgcacgccgcgttaagctgcccgattcccgtcatataagaaccgacgccaccggagagcgtgaccaggcgaatttgctgactgctaataaaaccacttaagcgttgcagcgtattcatggttgcctcgccaaaaccaatcgccagcatctgttgtggttgaagtaaactcatcaacatatgcgccgcgcctatccccagtcgcccaccgacatcagcatccgcaagcccagggatcacccggacatgttgcaggctaaactgacgacgtaattgagtttcatattccagacagccttcaaagcgagaattaatctgtacgcgaataatgccggactgatgccctttctccagcaatcggctcactttcaaacgtgtcaggccgagacgatcgctgatctcgctctgggtcagcccgtcgtgatagtaaaaccacgcgatccgcgcgacctgttcttcttcacacattccctgttcactaattgcgctatcgttgattgtcataattcattcttcactttgaacatatttaaatctttaatgcaattgttcagttcttgctcatttatatctgtgatggcaaccacagtttgactctacgagcatgaacaaacgcaaccgtgaaaatcaaaatagcataaattgtgatctattcgtcggaaatatgtgcaatgtccacctaaggttatgaacaaattaaaagcagaaatacatttgttcaaaactcacctgcaaaactgaacgggggaaatatgcaaacgagtgatacccgcgcgttaccgctactttgcgcccgcagcgtttataaacagtatagtggggtcaatgtcctgaaaggcatcgattttacgttgcatcagggggaggtccacgccctgctcggcggcaatggtgccggtaaaagcacgttaatgaagattattgccggtattacccctgctgatagcggtacgctggagattgagggcaacaactacgtcagattaacgccagttcatgctcatcagctgggtatttatctcgttccccaggaaccgctgcttttcccaagcctgagcataaaagaaaacatcctgtttgggctggcaaaaaaacagctctccatgcagaaaatgaagaacttgctggcggcgctgggctgccagtttgatctgcatagtctggcaggaagcctggatgtcgccgatcgccaaatggtggaaatcctccgcgggctgatgcgcgacagccggattctgatcctcgatgaacctaccgccagccttacccctgcggaaaccgaacgcttgtttagtcgcttgcaagagctgcttgctactggcgtgggtattgtttttatcagccataagctgccggaaattcgccagattgccgatcgaattagcgtgatgcgcgacggaaccatcgccttaagcggcaaaaccagcgaactgtctaccgacgacattattcaggccatcaccccagcggtacgggaaaaaagcctctctgccagccaaaaattatggctggagttacctggtaaccgcccacaacatgccgccggaacgccggtgctgacactggaaaatctgaccggcgaaggtttcaggaatgtcagcctgacgctcaatgccggagaaattctgggcctggctgggctggtgggggccggacgcacagaactggccgagacgctctatggtctgcgtactttgcgtggcggacgcattatgctgaatggtaaagagatcaataaattatccactggagaacgtttactgcgcggtctggtttatctgccggaagatcgccagagttccggactgaatctcgatgctagcctggcctggaacgtctgcgcccttactcataaccttcgtggattctgggcgaaaaccgcgaaagataatgccaccctggaacgttatcgtcgggcgctgaatattaaattcaaccaaccggaacaagctgcacggacattatccggtggcaaccagcaaaaaatcctcattgccaaatgcttggaagctagcccgcaagtattgattgtcgatgagccgacgcgcggcgtggatgtcagcgcccgtaatgatatctaccagctgttgcgcagcatcgccgcacaaaatgtggctgtgctgcttatctcctccgacctggaagagatcgaactgatggcagatcgtgtgtatgtgatgcatcagggcgaaattacccactctgcactgaccgagcgcgatattaatgtcgagactattatgcgcgttgccttcggcgatagtcagcgtcaggaggcgagttgctgagctaaagtcagcgtcaggaggcgtcatgctgaagtttattcagaacaaccgtgaaatcacggcactgctggcggtggtgctgctgtttgtattacccggttttctcgaccgccagtatttaagtgtgcaaacgctgaccatggtttatagcagcgcgcaaatcctgatcctgctggcaatgggcgcgacgctggtaatgcttacgcgcaatattgatgttagtgtgggtagcattaccggaatgtgcgcggtgctgttggggatgttactgaacgcaggatatagtctacctgttgcttgtgtcgcgactttactgcttggtttgctcgcgggatttttcaacggtgtcctggtcgcgtggctaaagatccctgccattgttgccacccttggcacgttagggttgtacagaggcatcatgttgctgtggactggcggcaaatggattgaagggttacccgccgaactgaaacagctctccgccccgctgctgcttggcgttagtgcaattggttggttgacgataattctggtggcatttatggcctggctgctggcaaagacggcgtttggacgcagtttttatgccacgggcgataatttacagggcgctcgtcaactgggcgttcgtactgaagccattcgcattgtggcatttagcttgaacggctgcatggcggcactggcgggaattgtgtttgctagccagattggttttatccccaaccagaccggtaccgggctggagatgaaagcaattgcagcctgcgtgctgggcggcattagtttgctcggtggttccggtgcgatcattggtgcggtactcggcgcatggttcctgacgcagatcgatagcgtactggtgctgttgcgcattccggcatggtggaatgattttatcgcgggtctggttctgctggcggtgctggtgtttgatggacgcctgcgttgtgcgctggaacgtaatctacggcggcaaaaatatgcccgctttatgacgccaccgccatccgttaaacccgctagcagtggtaaaaaacgggaggccgcataatgcgtattcgctacggttgggaactggctcttgccgcactgctcgttattgagattgtcgcatttggtgcaattaacccgcgaatgttagatctcaatatgttgctgttcagcaccagtgactttatctgcattggcattgtcgccctaccgctaacgatggtgattgtcagtggcgggatcgatattagctttggtagcaccatcggcctctgcgccattgcattgggcgtactgtttcaaagtggtgtgccgatgccgctggcgatactcctgaccttactgctcggcgcattgtgcgggctgatcaacgccggattaattatctataccaaagttaacccgctggtgattacgcttggcacgctgtatctgtttgccggaagcgctctgctgctttccggtatggccggagcgacggggtacgaaggtattggtggattcccgatggcgtttacagatttcgctaacctggatgtgctgggactccccgttccgctgattatcttcctgatatgtctcctcgttttctggctctggctgcataaaacccatgccggacgtaatgtgtttttgattgggcaaagcccgcgcgtggcgctttatagcgcgattccagttaaccgtaccttatgtgcgctctatgccatgacggggctggcgtctgcggtcgccgctgtgctgctggtaagctattttggtagtgcacgttccgatctcggtgcgagctttctgatgcccgccatcaccgccgtggtgcttggcggggccaatatttatggtggttccggttccattatcggcaccgccattgcggttttattagtgggatatttgcaacaaggtttgcaaatggcaggagtgccaaatcaggtgtccagcgccctttccggtgcgctacttatcgtcgttgtcgtaggtcgttccgttagcctgcatcgccagcaaattaaagagtggctggcgcgtcgggccaataacccattgccataaaggatatcttcatgacacttcatcgctttaagaaaatcgccttacttagcgctcttggcattgccgcaatctctatgaatgtgcaggccgcagagcgtattgcatttattcccaaactggttggcgtgggattttttaccagcggtggcaacggcgcacaacaagcgggtaaagagctgggcgttgatgtgacctacgacgggccgacagaacccagtgtttctggtcaggtacagttgattaataacttcgtcaatcaaggttataacgccattatcgtttctgcggttagccctgatggcttgtgtccggcactgaaacgcgccatgcaacgtggtgtgagagtgctgacctgggactctgatactaaaccggagtgccgctcttactacattaatcagggaacgcccgcccagttaggaggtatgttggtggatatggcggcgcgtcaggtgaataaagacaaagccaaagtcgcgtttttctacagtagccccaccgttacggaccaaaaccagtgggtgaaagaagcgaaagcgaaaatcgccaaagagcatccaggctgggaaattgtcactacgcagtttggctataacgatgccactaaaagcttacaaaccgcagaaggaatattaaaagcgtatagcgatctcgacgccattatcgcccccgatgccaacgccctgcccgctgccgcacaagccgcagaaaacttgaaaaatgacaaagtagcgattgtcggattcagtacgccaaatgtgatgcgcccgtatgtagagcgcggcacggtgaaagaatttggcctgtgggatgtggttcagcaaggcaaaattagtgtgtatgtcgcggatgcattattgaaaaaaggaagtatgaaaacgggcgacaagctggatatcaagggcgtaggtcaggttgaagtcagcccaaacagcgttcagggctatgactacgaagcggatggtaatggcatcgtactgttaccggagcgcgtgatattcaacaaagagaatatcggcaaatacgatttctgatgtgcattacttaaccggagtaagttatggcagatttagacgatattaaagatggtaaagattttcgtaccgatcaaccgcaaaaaaatatcccttttaccctgaaaggttgcggtgcgctggattggggaatgcagagtcgcttaagccggatatttaatccgaaaacgggtaaaaccgtgatgctggcttttgaccatggttattttcagggaccgactaccggacttgaacgcattgatataaatatcgccccgctgtttgaacatgccgatgtattaatgtgtacgcgcggcattttgcgcagcgtagttccccctgcgaccaataggccggtggtactgcgggcgagtggtgcgaactctattctggcggaattaagtaatgaagccgtggcgttaagcatggatgacgccgtgcgcctgaacagttgcgcggtggcggcgcaggtttatatcggcagcgaatatgaacatcagagcatcaaaaatattattcagctggttgatgccggaatgaaagtgggaatgccgaccatggccgtgactggcgtgggcaaagatatggtgcgcgatcagcgttatttcagcctcgcgactcgaatcgccgctgaaatgggggcgcaaattatcaaaacctattatgtcgaaaaaggttttgaacggattgttgccggatgtccggtacccattgttattgctggcggtaaaaaattaccggagcgcgaggcgctggaaatgtgctggcaggctatcgatcagggcgcttctggtgtggatatggggcgtaatattttccagtctgaccatccggtggcgatgatgaaagccgtacaggcggtggttcaccataacgaaacggctgatcgggcatatgaactctatctgagtgaaaaacagtaactgcggatctaaggagaagaattatgcacgtcacactggttgaaattaacgttcatgaagacaaggttgacgagtttatcgaagtttttcgccagaaccacctgggctctgtacaggaagaaggcaatttgcgcttcgatgtcttacaggacccggaagtgaatagccgcttttatatctacgaagcctataaagatgaagacgcagtggcgttccataaaaccacgccccactacaaaacctgtgtcgcgaaactggaatctttaatgaccgggccgcgtaaaaaacgtctgttcaatggtttgatgccgtgaggcgaatttatcaattttatctacaattggggtaacgcgctgacgggagtaaaaaaatgtctgactggaacccctctttatatctacacttttccgctgaacgaagccgtccggcggtggagctgcttgccagagtgccgctggaaaatgtcgaatatgttgccgatcttggctgtggcccaggtaacagcaccgcccttctacaacaacgttggcctgcggccaggataacaggcatcgacagctctccggcgatgattgctgaagcgcgcagtgctttgccagactgccagttcgtggaagcagacatccgcaactggcaaccggtacaggcactcgatctgatttttgctaatgccagtctgcaatggctgcccgaccactacgaattgtttcctcatctggtttctttacttaatccgcagggcgtgctggcagtacagatgccagataactggctggagccgacccatgtgctcatgcgcgaagttgcctgggaacaaaactacccggatcgcgggcgtgagccgttggctggcgttcatgcttactacgatattttgagcgaagccggatgtgaggtcgatatctggcgaaccacctactatcaccagatgccgagtcaccaggcgattatcgattgggtgactgccactggattacgtccgtggttacaggatctgaccgagagcgaacagcagctttttcttaagcgctaccatcagatgctggaagagcagtatccactgcaagagaacggacagatactgctggcatttccgcgtctgtttattgttgcccggcgtatggagtaaatatcacgtcagctggtaatgacgatcgggaagaatttttgctggaatttcggcttcatcgttcatctgtaacaggtcaatttcaatagcgttgcagatggcatccagtggtaaatcattgttttcagtaccgaacggatcttccagttcttccgccagacaatccaggctaataaaagtgtaggaaatcagcacagagataaaaggcgtcatgtaatgcaggtccacgaccagcgcgaacggcagcatgatacaaaacagataaacggtacgatgcaaaatcagggtgtaggcaaagggaattggcgtataggcaatgcgctcgcatcctgccaggaccgcactaatatcattaagccgatcgttgaggctaataaacaggatatcactaagctgtccattgcggcgctgaaccgccaaccattctcccattattaacaagatacggttagctggagagttgctagccagtacacgctgaagatcttcagtcttgagataatgagccagcacttccgcctgtggctgtttgcgtaatgtcatgcgtaaacagtgggcgaaagcgatttgcagccgggcaaactcccttacacttgcgctatccggcaatgtcgtttttacctcgcgcagtaagctccgactggcaatcatcaactgcccccaaagttttcgcgcttcaacgtaacgggcgtacccggcattattacgaaaaccaagaaaaatggcgatggcgacaccgagaatgctgaacggtgcgagggtgaatttgatgcccagatgcgtgtaccagggcagcatgaaaataacagcgatagaaaagagaaaattgagtagtaagcggctggatatcttggataatacactgccgtgccagacaaaaatacggcgcagccagtgttgttgtggacgaacaatcatggttatcttcaggcgtggaaaagtcgccctattaaacgtgattacgatcacattctcaagacgctacttacaaattacctacaagcttacaacattagcaggcgctgcatgtggcacctgttaatgataaaggcatataggatgttgtaactaatatggtgaaataagaaacccggtcgaaaccgggttcagaagtaacggtgttattagcacaacggacgtacagcttcgcgcatccctttttcgagaatcgcatccaggtcattagcaacctgctcgaccagaccaggcacttgcgtcaggtcctgctcccagtggtctttttctgccaaaacaatcgctaccagttcctgggtgccgataacacggtcacgatgctggctccagagttgctgataacgttccagccagtgtgcatcgtcctgtaccggatatgtttcgccgttacgctcaccacgatagaacgcaatcaatgccgctaatgcgaaagtaaggcgcgccggaagtgtgccgtttgccttctgccctgccagcagctgtggcaggatgcgggtgcggaacttggtcataccgttgagcgcgatagacagcagctgatgcttaatgtacgggttacggaaacgcccggtgactgcactggcgaaagattccagttcatcacgaggcaaatccagtaccggaataatttcttcgtagatagctttttcaacgaatgcgcaaatttcagcatcgttcatcgcttcacctacggtatccagccctgcctggaacgccaccggcaccagcgcggtgtgcgcaccgttgaggattgccactttgcgttctttgtacggtttaatatcgtcaacaatcagcacgttgagcggatatttgtccagacgcagttcagtcgctaaggatttcggtccctgaatcacaaacaggtaaaagtgttcagcggtgtcgagaaaaccatcgtgataacccagttcttcttccagtttagccacttcatcgcgcggataaccggtaacgatacggtccaccagcgtagaacagaagctgttagcctgatccagccattgaataaatgcttctggcagtgcccactcttgcgcatagcgcagcaccagttcacgcaacgcgtcgccattgtagtcaatcaactcacacggaatgatgatccaacctttatccagcgcaccgttgaaatggctaaagcgttcgaacagcagacgggtcagttttgccggatagcttaccgctggcgcgtcatcgaatttatcgcccgcatggtagctgatacccgcttcggtggtgttagagaaaacaaagcgcatttccgggttgtgcgccagtttcaggaattcatcgtattcactgtagacgctgatttcacgattaacgctgcgaatcagacgcgcgtcgctgaccgcttcccccttctcattcaggccacggataatggtggtgtacagaccatcctgcgtgctcagactcggcgggaaactagtttcaatcggacgaacaacgaccacgccagaattcagatcggtgtgctcattcaggagatcgatttgccagtcaacaaaggcgcgcaggaagttaccttcaccaaactgaatgatacgttctggatactgtgcaccgggaaaatcgcgacgatttagtgttttcacaatgggttcccttctgattagtcatacaacctgtttgaattggtacgacaggttagcaaactttaatacgccgaacccctgttttgatcaactcctgatgattaatgagcagttttatgagaaaagtgtggcgcggatcatggtttaatcgaggaaaaacgccttttcctggatcataaagtggtagaacacattgcattcaaatcgcgcgtaatgaataaagatgtcagacaacttcctcaccgtaacgcatagtgctggtacggttgcgcccatctttcttgctgcgatacagacacgtatcggcttcgaccatcaatttattaaagtcatcggtcagcgttaggtagcttgcgcgaccactaccgacgccaatacttaccgtgagataaagcgttttttgttgccaggtgaatggttgcagttcaacgcctttacggattttttccgccattagcagaccatcgacaggattcacgctcggcactgcaacagcaaattcttcgccgcccattcgcgccaccagccccttatcaccgacaatcttctgaatatgccgggcaaacacgcttaacactttatcgccacattcatgtccatagttatcgttaatgcttttgaaatagtcgatatcaagcagcatgacagtcagatgttgtgtctgtttcaggcttggacttttcagcgcctcataaagaccggaccgactgtaaacctgagtcagaaaatcaaagtcggctcgcagcgcaacttgcttcattaggctattgatcgctgccacgctaaaagaaaccataattgggcatatcgccatcgtggcaataccgagacgtgcggagaacatttgcggaatggagaacgggctaccgacgctgatatcaatcacgctatttgccaccagtacgatttccaccgcaccggtgacaaaggtcaacagacatgttacctgcggcgtatagcgcactgcacaccagattaatgcaggcagcgggaacgccagactccccgctccgccaatgactacgctggcaataacgctcacaataagcgcgatggcgggcatcatctgttctgctttaaagcgcggcagcactccaggaatagccaacgtcagcatacaaggcacgatcaacacgcccgtactgaattgctcactgaaccagtccgcaagcaaaggccagaaatccagactatcaatactgaccgaaccaagatagcatgttcgctgacagcggcggcaaataaaggtaccctgggaatgctattttgtcgttttccgcaattctcatggctgattcatctgtacaaccagccagtgatagattaccgccacgatataacgttgttgttcttcgcttaagctaacaccctgcggaatgttatgccacttagccagacaaccgcgacagcaggtcgcggtggcgtgctgagcgataaacaccggatgcccgcgcatgggggtttgcttaccgtcattagccggtaatgccggagcaagacgtttagcgacaaaatccgccgcatgttgttcgatgactggcgcgcctttctccaggcaatactgacgctctttcatgcccagacgaaagcgagagcgaaatttactacgggataaacgcgcgaagagtggatcgagagactgcattaataaacgctacgccctaactgtttcgtcaattgttcaagaacggcaatacccgcaaggctgttacctgcatcatccagttccggactccagacagcgatggccatttcatgcggaacaatcgccacaataccgccaccaacgccagatttcgccggtagccccacccgccaggcaaactcccccgcgttctggtacataccactggtcgccatcagcgcgttaatttgccgcgcctgcattggcgtcaccactggttcatcaatatgaatagctttcccctgattagccagaaagacaaacgtccgggccagctctacacagctcattttcagagcgcagtaatgaaagtagttttgcagaacggttgtcacgtcatgatggaaattgccaaagctcttcatcagccaggcgatagccgcatttcgcgcggaatgttcaaattcggaacgcgctaccaccgtatcgtaggaaatatcagacacaccgcttaagccgcgcacgacttccagcatacgttgccgtggtgcgcttaatcgcccttgcaacatatcgcagaccaccagcgcaccggcattaatgaacggattacgcggtataccctgctccatttccagttgcactaaggaattgaacggacttccagacggatctttgccgacgcgttgccagatttcctcttcggagtaatgacgcatggcgacaacgagactcagcactttggaaatagactgaatggaaaaacgttcttgcgcgtctccggcctgaaaaagctgtccgtcaacggtacagatagcaatccccaatcgggaaccgtctactgtagccagcgccggaatataatccgcgactttaccctgaccaatgagcggccgcacttgccgcaagatgttttctaaaattgcattatccatggcgactgccactttctactcctggaccgcaggtctgaaaagacctgcgagtatatcagagctgaatatgtcgcgtcagatccggtctttccacaccgtctggatattacagaattcgtgtaagccgaaatgggaaagctcacgaccaaagccactctttttcacgccaccaaaggccactcgcgcgtcgctggcacaataaccattgataaacaccccaccgcattccagacgtgccgccatctgtctggcctgtgtttcgtcagtggtaaaaatggtcgcactaaggccgaactcactatcattagccagttccagtgcatgttctgcatctttcgcaatggtgattgccgcaacggggccaaacatttcttcccgaaacgcggtcatttctggggtaacattcgccagaaccgttggcggatagtagttacctgccccagccatcttttccccgcccagtaacaaacgcgcaccctgcgccagggttttctccacctgatgatgcagctcatcacgtaaatcaaaacgagccattggtccgagagcgttctcttcgtcacggggatcgcccattttcaaggctgccgcagctgccacaaaacgttcggtaaatgcgctagcaattccctcttcgataataaagcgttttgccgctgcacatacctgtccggtattctgataacgtccggctaccgccgctttcaccgccagttccagatcggcatcgttaagcacaataaacggatcgctaccgcccagttccagtacgcattttttcagtgccgctccagcctgtgcgccaatagccgctcccgcacgaacacttccggtcaccgtgacagcagcaatgcggctgtctttaatcatctgactgacaccgtcgttgtcggcattcagccagccatatacgccttgtgggatacccgcatctttaaacacctgggcaatgagctgtgcacagcccatcacattcggcgcatgtttaagtaagtagccgttacctgcaagaatgatgggaacagcgccacgcatcacctgccataacggaaaattccacggcataatcgccagaatcgtccccaacggtcgatactcaataaccgcctgctgattttccaccagcgtaggttccgccttcagcattgccggaccatgttctgcataccagtcacacaaattcgcgcttttcgccacttcagcgcgcgcctggttgattggtttgcccatttcgcgggtgatcatttgcgccatttcttcgctacgagcgcgcagagccttaccgatatcacgcagtttttcagcacgataatctatatttgtctcgcgccagtcgcgaaagcctgctgccgccagctgaagtgcgttttcgatatcgtcagcgccagcccacggcagcacagaaagttgttcacccgtggcaggatttatgctaattgcatgagttgccggagtaatggtcatcggggtatctcctttatgagtcatggtatgaagatacgcagatttactcttgctttaaaatgaataatattaagccacttattcacgaatcgagaatgctatggatctgacccaactggagatgttcaacgcggttgccgaagctggcagcataacccaggctgcagcaaaagtgcatcgcgtgccgagcaatctcactacccgtctgcgccagctggaaacagaactgggggttgatctgtttattcgcgagaatcagcgtttacgtctctctcctgccgggcataactttttacgctatagccaacaaattctcgcgttagtggatgaagcgcggagcgttgtcgctggcgatgagccgcaaggtttattttctcttggtagcctggaaagcaccgctgcagtgcgcattccagccacgctggcggaattcaaccgtcgttatcccaaaattcagtttagtctttccaccggcccttccggcactatgctggatggtgtactggagggaaaactgaatgcggcgtttattgatggacccattaaccatactgccatcgacgggataccggtataccgcgaggaactgatgatcgtcacgccacaaggatatgcgccagtaacccgtgccagtcaggttaatggcagtaacatttatgccttccgcgccaattgtagctatcgtcgccacttcgagagctggtttcatgctgacggtgccgctccgggaactatccatgagatggagtcttatcacggaatgttggcctgtgtgatcgcaggagcaggcattgcgcttattccgcgctctatgctggaaagtatgccggggcatcaccaggttgaagcgtggccgttagctgagcaatggcgttggttaacaacctggctggtctggcgtcgtggtgcgaaaacacgtccgctcgaggcatttattcaactgctggatgtgcctgacagcgcaagacagggatatcaatgagctatttttgatagttcttgcggttaatatgctctatatagtgatgttccgatgacttatgactatatggggcaaatatggttacgccagtaagcatcagcaattacatatctcttcctgatgattttcccgtacgtaatattgcaccgcaggtaaaagaagttttaaaggattttattgatgcacttagtacaataatatgtaatgaagagtggcgcacgtctttaaacatcaacagtgccacaaaaaagatatttaataaccttgacaacttaagttatattcagaggacttcttttcggggtaacgacacgctatacaatgaaaaggttcagtttaaactcacttatcccgccaggaatggaagacacaaagaaaatattgaatttcaggtagtaataaatttaagccctatttatttagataattttcgccatgatggagaaattaatattttttgcgctcccaacccaaagcctgtcactatggggcgcgtatttcagaccggcgtcgagcgtgtactctttctgtttctgaatgattttattgaacaatttccaatgatcaaccctggtgttcccatcaaaagagcgcatacaccacatattgaacccctgcctagcgatcaccataccgctgcagattacttacgccagtttgatttgcttgtcctgaattttatctctcgcggtaattttgtcatactcccccgattatggaataactctgaggttcacagatggttcgtcaataaagatcctaacttgatcaccgccattctcgacataacggacagcgaattaaaagaggatttgttgcaaagcctgatggatagtttaggttctaacaaacatgtactacccgaagtctgcatctgctttttatcccttttagcagaacaagaatctcctcattttcagaacttgtttttatttttcgccaatatgttattgcactatcaccaatttatgaatcccaatgaaagtgatttgaatgacgtgttgatgccagcaagtttaagtgatgataaaattatcaaacatatggcgcgcaggaccctcaaactgtttgtaaaaaatgaaacaccgccaaaagttactcacgaagacctggtgaaaaacaggcctcgctcccctgtcagaccacctatacccgcaaccgccaaaacgccagacctccctgaacgtcattaaaccgtgatgttaccgactctctgacgcgtgaaagaatcagcgtcagagaaacggaaaacgcgatccagatcacaaatgcattgtattcacatcattaaccgttttaagatcatttcatcactttttcgcaactcacccgataatctgttatgacaacaaacactgtttcccgcaaagtggcgtggctacgggtcgttacgctggcagtcgccgccttcatcttcaacaccaccgaatttgtccctgttggcctgctctctgacattgcgcaaagttttcacatgcaaaccgctcaggtcggcatcatgttgaccatttacgcatgggtagtagcgctaatgagtttgccttttatgttaatgaccagtcaggttgaacggcgcaaattactgatctgcctgtttgtggtgtttattgccagccacgtactgagctttttgagctggagctttaccgttctggtgatcagtcgcattggtgtggcttttgcacatgcgattttctggagcattacggcgtctctggcgatccgtatggctccggccgggaagcgagcacaggcattgagtttaattgccaccggtacagcactggcgatggtcttaggtttacctctcgggcgcattgtgggccagtatttcggttggcgaatgaccttcttcgcgattggtattggggcgcttatcacccttttgtgcctgattaagttacttcccttactgcccagtgagcattccggtagtctgaaaagcctcccgctattgttccgccgcccggcattgatgagcatttatttgttaactgtggtggttgtcaccgcccattacacggcatacagctatatcgagccttttgtacaaaacattgcgggattcagcgccaactttgccacggcattactgttattactcggtggtgcgggcattattggcagcgtgattttcggtaaactgggtaatcagtatgcgtctgcgttggtgagtacggcgattgcgctgttgctggtgtgcctggcattgctgttacctgcggcgaacagtgaaatacacctcggggtgctgagtattttctgggggatcgcgatgatgatcatcgggcttggtatgcaggttaaagtgctggcgctggcaccagatgctaccgacgtcgcgatggcgctattctccggcatatttaatattggaatcggggcgggtgcgttggtaggtaatcaggtgagtttgcactggagtatgagcatgattggttatgtgggcgcggtgcctgcttttgccgcgttaatttggagtatcattatatttcgccgctggccagtgacactcgaagaacagacgcaataattgaaaggcccattcgggccttttttaatggtacgttttaatgatttccaggatgccgttaataataaactgcacacccatacataccagcaggaatcccatcagacgggagatcgcttcaatgccacccttgcccaccagccgcataattgcgccggagctgcgtaggcttccccacaaaataaccgccaccaggaaaaagatcagcggcggcgcaaccatcagtacccaatcagcgaaggtactactctgacgcactgtggacgcgctgctaataatcatcgctatggttcccggaccggcagtacttggcattgccagcggcacaaaggcaatattggcactgggttcatcttccagctcttcgctcttgcttttcgcctccggactatcaatcgctttctgttgcggaaagagcatccgaaaaccgataaacgcgacgattaagccgcctgcaattcgcagaccgggaatgctaatgccaaatgtatccatcaccagttgcccggcgtaatacgccaccatcatgatggcaaatacgtacacgctggccatcaagctctgacgattacgttcggcactgttcatgttgcctgccaggccaagaaataacgcgacagttgttaatgggttagctaacggcagcaacaccaccagccccaggccaattgctttaaacaaatctaacattggtggttgttatcctgtgtatctgggttatcagcgaaaagtataaggggtaaacaaggataaagtgtcactctttagctagccttgcatcgcattgaacaaaacttgaaccgatttagcaaaacgtggcatcggtcaattcattcatttgacttatacttgcctgggcaatattatcccctgcaactaattacttgccagggcaactaatgtgaaaagtaccagcgatctgttcaatgaaattattccattgggtcgcttaatccatatggttaatcagaagaaagatcgcctgcttaacgagtatctgtctccgctggatattaccgcggcacagtttaaggtgctctgctctatccgctgcgcggcgtgtattactccggttgaactgaaaaaggtattgagcgtcgacctgggagcactgacccgtatgctggatcgcctggtctgtaaaggctgggtggaaaggttgccgaacccgaatgacaagcgcggcgtactggtaaaacttaccaccggcggcgcggcaatatgtgaacaatgccatcaattagttggccaggacctgcaccaagaattaacaaaaaacctgacggcggacgaagtggcaacacttgagtatttgcttaagaaagtcctgccgtaaacaaaaaagaggtatgacgatgtccagacgcaatactgacgctattaccattcatagcattttggactggatcgaggacaacctggaaagcccactgagtctggagaaagtgagtgagcgtagcggttactccaaatggcacctgcaacggatgtttaaaaaagaaaccggtcatagtttaggccaatacatccgcagccgtaagatgacggaaatcgcgcaaaagctgaaggaaagtaacgagccgatactctatctggcagaacgatatggcttcgagagccaacaaactctgacccgaaccttcaaaaattactttgatgttccgccgcataaataccggatgaccaatatgcagggcgaaagccgctttttacatccattaaatcattacaacagctaattgaaaacgtgacaacgtcactgaggcaatcatgaaaccacttagttccgcaatagcagctgcgcttattctcttttccgcgcagggcgttgcggaacaaaccacgcagccagttgttacttcttgtgccaatgtcgtggttgttcccccaagccaggaacacccaccgtttgatttaaatcacatgggtactggcagtgataagagcgatgcgctcggcgtgccctattataatcaacacgctatgtaatttgttctggccccgacatctcggggcttattaacttcccacctttaccgctttacgccaccgcaagccaaatacattgatatacagcccggtcataatgagcaccgcacctaaaaattgcagacccgttaagcgttcatccaacaatagtgccgcacttgccagtcctactacgggcaccagtaagcttaacggtgcaacccgccaggtttcatagcgtcccagtaacgtcccccagatcccataaccaacaattgtcgccacaaacgccagatacatcagagacaagatggtggtcatatcgatagtaaccagactgtgaatcatggttgcggaaccatcgagaatcaggctggcaacaaagaagggaatgattgggattaaagcgctccagattaccaggctcatcaccgccggacgcgtactgtggctcatgatctttttattgaagatgttgccacacgcccaactaaatgctgccgccagggtcaacataaagccgagcatcgccacatgctgaccgttcagactatcttcgattaacaccagtacgccaaaaatcgctaaggcgatccccgccaattgtttgccatgcagtcgctccccgaaagtaaacgcgccaagcatgatagtaaaaaacgcctgtgcctgtaacaccaggctagccagtccagcaggcataccgaagttaatggcacaaaaaagaaaagcaaactgcgcaaaactgatggttaatccataccccagcagcaaattcagtggtactttcggtcgtgcgacaaaaaagatagccggaaaagcgaccagcataaagcgcaaaccggccagcatcagcggtggcatgttatgaagccccactttgatgaccacaaaatttagcccccatacgaccactaccagtagcgccaacaccccatcttttcggctcattctaccgcctctgaatttcatcttttgtaagcaatcaacttagctgaatttacttttctttaacagttgattcgttagtcgccggttacgacggcattaatgcgcaaataagtcgctatacttcggatttttgccatgctatttctttacatctctaaaacaaaacataacgaaacgcactgccggacagacaaatgaacttatccctacgacgctctaccagcgcccttcttgccagcagcttgttattaaccatcggacgcggcgctacgctgccatttatgaccatttacttgagtcgccagtacagcctgagtgtcgatctaatcggttatgcgatgacaattgcgctcactattggcgtcgtttttagcctcggttttggtatcctggcggataagttcgacaagaaacgctatatgttactggcaattaccgccttcgccagcggttttattgccattactttagtgaataacgtgacgctggttgtgctcttttttgccctcattaactgcgcctattctgtttttgctaccgtgctgaaagcctggtttgccgacaatcttagctccaccagcaaaacgaaaatcttcagtatcaactacaccatgctaaacattggctggaccatcggtccgccgctcggcacgctgttggtaatgcagagcatcaatctgcccttctggctggcagctatctgttccgcgtttcccatgcttttcattcaaatttgggtaaagcgcagcgagaaaatcatcgccacggaaacaggcagtgtctggagcccgaaagttttattacaagataaagcactgttgtggtttacctgctctggttttctggcttcttttgtaagcggcgcatttgctagttgcattagtcaatatgtgatggtgattgctgatggggattttgccgaaaaggtggtcgcggttgttcttccggtgaatgctgccatggtggttacgttgcaatattccgtgggccgccgacttaacccggctaacatccgcgcgctgatgacagcaggcaccctctgtttcgtcatcggtctggtcggttttattttttccggcaacagcctgctattgtggggtatgagtgctgcggtatttactgtcggtgaaatcatttatgcgccgggcgagtatatgttgattgaccatattgcgccgccagaaatgaaagccagctatttttccgcccagtctttaggctggcttggtgccgcgattaacccattagtgagtggcgtagtgctaaccagcctgccgccttccagcctgtttgtcatcttagcgttggtgatcattgctgcgtgggtgctgatgttaaaagggattcgagcaagaccgtgggggcagcccgcgctttgttgatttaagtcgaacacaataaagatttaattcagccttcgtttaggttacctctgctaatatctttctcattgagatgaaaattaaggtaagcgaggaaacacaccacaccataaacggaggcaaataatgctgggtaatatgaatgtttttatggccgtactgggaataattttattttctggttttctggccgcgtatttcagccacaaatgggatgactaatgaacggagataatccctcacctaaccggccccttgttacagttgtgtacaaggggcctgatttttatgacggcgaaaaaaaaccgccagtaaaccggcggtgaatgcttgcatggatagatttgtgttttgcttttacgctaacaggcattttcctgcactgataacgaatcgttgacacagtagcatcagttttctcaatgaatgttaaacggagcttaaactcggttaatcacattttgttcgtcaataaacatgcagcgatttcttccggtttgcttaccctcatacattgcccggtccgctcttccaatgaccacatccagaggctcttcaggaaatgcgcgactcacacctgctgtcacggtaatgttgatatgcccttcagaatgtgtgatggcatggttatcgactaactggcaaattctgacacctgcacgacatgcttcttcatcattagccgctttgacaataatgataaattcttcgcccccgtagcgataaaccgtttcgtaatcacgcgtccaactggctaagtaagttgccagggtgcgtaatactacatcgccgattaaatgcccgtaggtatcattaaccaatttaaatcggtcaatatccaacaacattaaataaagattcagaggctcagcgttgcgtaactgatgatcaaaggattcatcaagaacccgacgacccggcaatcccgtcaaaacatccatattgctacggatcgtcagcaaataaattttgtaatcggttaatgccgcagtaaaagaaagcaacccctcctgaaaggcgtcgaaatgcgcgtcctgccagtgattttcaacaatagccagcattaattcccgaccacagttatgcatatgttgatgggcagaatccattagccgaacgtaaggtaattcatcgttatcgagtggccccagatgatcaatccaccgaccaaactggcacagtccataagaatggttatccgttatttctggcttactggcatctctcgcgaccacgctgtgaaacatactcaccagccactggtagtgggcatcgatagccttattgagatttaacaagatggcatcaatttccgttgtcttcttgatcattgccactcctttttcacagttccttgtgcgcgctattctaacgagagaaaagcaaaattacgtcaatattttcatagaaatccgaagttatgagtcatctctgagataacattgtgatttaaaacaaaatcagcggataaaaaagtgtttaattctgtaaattacctctgcattatcgtaaataaaaggatgacaaatagcataacccaataccctaatggcccagtagttcaggccatcaggctaatttatttttatttctgcaaatgagtgacccgaacgacggccggcgcgcttttcttatccagactgccactaatgttgatcatctggtccggctgaacttctcgtccatcaaagacggccgcaggaataacgacattaatttcaccgctcttatcgcgaaaaacgtaacggtcctctcctttgtgagaaatcaaattaccgcgtagactaacgctagcgccatcgtgcatggtttttgcgaaatcaacggtcattttttttgcatcatcggttccgcgatagccatcttctattgcatgaggcggcggtggcgctgcatcctgttttaaaccgccctggtcatctgccaacgcataaggcatgacaagaaaacttgctaatacaatggcctgaaatttcatactaactccttaattgcgtttggtttgacttattaagtctggttgctatttttataattgccaaataagaatattgccaattgttataaggcatttaaaatcagccaactagctgtcaaatatacagagaatttaactcactaaagttaagaagattgaaaagtcttaaacatattttcagaataatcggatttatatgtttgaaaattattatattggacgagcatacagaaaaagcaaatcacctttacatataaaagcgtggacaaaaaacagtgaacattaatagagataaaattgtacaacttgtagataccgatactattgaaaacctgacatccgcgttgagtcaaagacttatcgcggatcaattacgcttaactaccgccgaaagttgcaccggcggtaagttggctagcgccctgtgtgcagctgaagatacacccaaattttacggtgcaggctttgttactttcaccgatcaggcaaagatgaaaatcctcagcgtaagccagcaatctcttgaacgatattctgcggtgagtgagaaagtggcagcagaaatggcaaccggtgccatagagcgtgcggatgctgatgtcagtattgccattaccggctacggcggaccggagggcggtgaagatggtacgccagcgggtaccgtctggtttgcgtggcatattaaaggccagaactacactgcggttatgcattttgctggcgactgcgaaacggtattagctttagcggtgaggtttgccctcgcccagctgctgcaattactgctataaccaggctggcctggcgatatctcaggccagccattggtggtgtttatatgttcaagccacgatgttgcagcatcggcataatcttaggtgccttaccgcgccattgtcgatacaggcgttccagatcttcgctgttacctctggaaaggatcgcctcgcgaaaacgcagcccattttcacgcgttaatccgccctgctcaacaaaccactgataaccatcatcggccaacatttgcgtccacagataagcgtaataacctgcagcatatccgccaccaaaaatatgggcgaaataactgctgcgatagcgtggcggtatagcaggaagatccatattttccgccaccagcgcccgcaattcaaaatcatcgacatcctgcattgcttcgttttcttccaggcaatgccagcgcatatcgagaagtgcggcgctaagcagttcgctcatctcataccctttgttgaacaggctggcattacgcattttctgttgcagttcgtcaggcattgctgccccgctctgataatgccgggcgtagcgagcgaatacctgcggatgcgttgcccagtgttcgttgatttggctcggaaattcgacaaaatcacgcggcgtgttggtgccggaaagcgtggcataacgctggcgggcaaaaaggccgtgcagcgtatgaccaaattcatggaataaggttatgacatcatcccagagtaacaacgcaggctcaccggcagcgggtttctgataattgcagacgttataaattaccggatgtgttttattaagcgtactttgctcaacaaaattgcccatccatgcaccgccgcttttactatcacgggcgaagaaatcaccgtaaaataacgccagccccacgccattatgatcaaaaatttcccacacacgaacgtcaggatggtagacaggaatatcaaaacgttcgacaaacttaataccgaagagctgattcgcggtccagaatacaccttcatttaacaccgtgtttaattcaaaatatggcttgagctgcgcctcatcaagatcaaatttctcccgccgtacctgttccgcataaaatgcccagtcccacggctgcgcgctaaacccgccctgctgcttatcgataaccgcctgtatggaggctaattcatcgctcgcacgttgacgcgccgctggaacaatttcccgcataaagttaagtgctgcttcaggtgtttttgccatctgatcggcgattttccatgcggcataatgaggaaaaccaagtagtgttgcctgttgtgcacggatctccaccagacgttgaatgatagcgcgggtatcattggcatcatttttttccgctcgcgtccagcccgcaataaacagtttttcacgcgtcgcacgatcgcgcatttcggcaagcgccggttgttgggtggtattcagcagcggaatcagccatttgttatccagacctttctcgcgagccgcctctgccgccagcgcaatctcttgctcactcattcctgccagctgcgcgatatcgttcacaaccagaccgccggatttatttgctgccagtaatcgctggttaaactggctggtcagggtcgcagcttctgtattcagtacttttaattttgctttatcagcttgcgcaagtttggctccggcaaggacaaaacgttgatgaatcacctccaccaggcggatggattcactatcaagccccagggattcacggcgctgccagacagcatctacccgcgcgaataattcaccgttcagatagatatcattagccagttccgccagttcagcggaaaactgctcgtcaagacgctgtaattcatcattggtatgcgccgcagtcatcgcaaaaaagacgctggtaacgcgggtaagtaattctccgctttgttccagtgccagaatagtattgttgaaatcaggcatttgcgggttaagcgcgatggcagcaatttctgcccgcttttgctgcattccctcatcgaatgccgggcgatagtgatgattggcaatttgatcaaaatggggagccagatacggcagtgtgctttgcacaaggaaaggattcattgttgtcattttcttctcctgaacgcgaggtgttccatagcgtaggcttactgataacggagtgcaatcttgcaatccagtattacccgctcttaagcatcccgtgctatgttattgacacacaaaagcgttgaggaacagtgagaagcgcagtgcccagccatcccgatactgctgctttcaccaaatccttagtgcttctttcgtgtttttctattgtcataatggttatctctaaaaaagaggtaagatgcgtactacttactcgccgttattggtattattcagaaaaagtgagtaagactttgcagcaatgtttttgatcctgttcaaataaactaatggcatcagcaacatgctggaaatcaaacgtatgggtaattaatttttctggtttaattaaccctttacttaaccagtcgataacgatcgggaatttatttgcatttaagcgactagagaaaatagagagttcttttccggtaattccttgctgaatcacttcagacggttcactggagaaccccatcaatacaatacgtgccgctggagaagccagcgttacggcctctttcaggatagaaggatgacaagccgcatcgataattaatgtcggcttgatgcctttttcagtgaaaatctcgccaagcggtgtctggctgttattaatcgcccagtcagccccgctctctttcgctttttccagtcgttcatcaatgcgatcggcaacaatcacatttttaacgttatagacgccttttaatacctgaacgatcgtcaggccgattggaccggcaccataaaccagaacggtatcattttcagtcggttgaccatgtccggttacgttagccgcaatggtaaaaggttcgatcattaccgcatattgatcggccactgcttcaggaattttccacgcattttttgccggaaccacggcatattcactgaaaccaccgtcagcgtgcacacctaatacagccagtgtcgtacaaacgttcggtttacctatagagcacggatagcaatgcccacagctgaccaccggatcgacagcaacacgttcaccgactctggcgctttccacgccttcacccactgcatcaatgacgccaaagaattcatgaccaatgacgcgcggatatttcgcaaaaggattatgcccacgataaatatggctatcactaccacaaattccggcaagtttcacttttactcgtacttcacccgcactcggggtgggtatttcacgttcgacaatcgccagttgattcggtttttcaattaatatgcttttcattatcttactccttaccagttccacagcgtgccatcttccagacgtgcgactggtagataagcaggttcatagggatatttcgccgccagcttttcatcgaattcgataccaagacccggtttgtctcccggatgcatatagccgttatcgaaagtccagttgtgcgggaagacttcgagcatttgttcggaataacccatgtattcctggacaccgaaattggggacccacagatcaaagtgcagcgccgcagccatgcagactggactcaaatcggaaggaccgtgactgccagtacgtacctgatacaggctagcaaaatcggcaatccggcgcataccggtaattccgcctgcatgggtcagcgtggtgcggatataatcgatgagttgctcttcaatcagttgtttgcagtcccagatgctgttgaagacttcacccactgcgatgggtgtgacggtatgttggcgaatgagacggaagcattcctggttttccgcaggcgtcgggtcttccatccagaacatgcgataatcttcaatgcttttaccaaagcgcgccgcttcaataggcgttaagcgatggtgcatgtcatgcagcaaatgttcattaaaaccaaacttgttacgtaccgcgtcaaacaatttcggcatgaaatcgaggtatttctccgtgctccacagctgctcttccggccactgtcctttggttgcgggttcataagccagacctttacctttgctcatgccgtaggtggttttcataccagggattccgcactgcacgcggatggctttgaatccaagctcttgatgacgggcataatcatccagagcttcatcaatactgtgaccggtggtatggcaataaaccatcaccccttcacgagacgcgccgccgagtaactggtaaagcggcatgttggcagctttggctttaatatcccacagcgccatatcaaccgcactaatggcgctcatcgtaaccggaccgcgacgccagtaagcacctttatagaaaaactgccagatatcttcgatacggtgcgcatcgcgaccaataagctgcggacaaaggtgatcctgcaaataagaggccacggaaagctcacgtccattgagggtggcatccccaaggcccgtaataccgtcctcagtggtgatttttaatgtgacgaaattacgccccggacaggtaacaaaaacttcagcctttacgatcttcatgttcgattccttgcatcgcttgtcgtgatgcatgaaatctacgcaactgagctactaccatacaagtataaagatcgaaaaaagccggagtgatcacaaaaaaaggcgtatatttgcgctgtgaatggttgacaaaagatgaaatagaataccttttgtcagctgacacttcctcttatcttattgataaaatggatttatgttcttacgtgcgcccccagcccgcaacaatgatcaacatgccgcaaagcgcaatcaacgcacccgtccagtcataaagagtcagtttcacgccatccacaacgcgcagccacatcaacgccgtgcagacataaacgccaccataagccgcgtaaacacgcccactcgccgctggatgcaacgttaacaaccagacaaacagcgccagactaatccccgccggaagcaacagccagatactggcgtttcgttttaaccacaaccagggcagaaagcatccaataatttcacacagcgcagtagcaaaaaatagtaacgttgttttaatcatctttgtctcttattgacatcatgtatagttatagggcgacataatatcatcaatataaacaccctcctggtacgttttgcgtccgcagtggatggtgtagaatcacctttaatcattcatacagggaatgaattatgaaaatcactctcagcaaacgaatcggcctgctcgctattctgctgccttgcgcactggcattgagcacaactgttcatgccgaaactaacaaactggtgattgagtctggcgacagtgcacaaagccgccagcacgccgctatggaaaaagagcaatggaatgacacgcgcaatctgcgccagaaagtgaataaacgcactgaaaaagagtgggataaagccgacgccgcttttgataaccgcgataaatgtgagcaaagcgccaacatcaatgcctactgggagcccaatactttgcgctgcctggaccgtcgaactggccgcgttattaccccctaacctgttattgatttaaggaatgtaaggacacgttatgccaagcgcccacagtgttaagctacgcccgctggagcgtgaagatttacgctatgtacatcaactcgacaataacgccagtgtgatgcgttactggtttgaggaaccctacgaagcctttgttgaactctctgatctgtatgataagcatattcacgatcagagcgaacggcgctttgtggtggaatgtgacggcgaaaaagccggtctggtggagctggtggaaattaaccatgttcatcgccgcgcagaatttcagataattatctccccggagtatcaggggaaaggtctggcaacccgtgccgccaaattagcaatggactatggctttaccgttctcaatctctataagctgtatctgatcgttgataaagagaatgaaaaagcgattcacatttaccgcaagcttggctttagcgttgaaggtgaattgatgcacgagttctttattaatggtcaatatcgtaatgccattcgcatgtgtatattccagcatcagtatctggcagagcacaaaacaccgggtcagactctcctgaagccgaccgcacaataacattaataataatcgatcgtatttttgatggtgtaaacccgttcgacggcgggttttactccttcatcaacaatgattagctgacagtccaccggattagcgtgactgtcatattcacagctctgttttacattaccaacccgttgattattcagtaaagtaaccgctgtgtaatctaattttttgatcggatccgtacttggcgtggcgctgacagataatgttttgtcgttacttttcgtggttttacccagcggataaccctgatcatcatagcgatattccatctgcatttgtttgctgctggctttaatcacgaagccattatcatcggtttcccaactcaccccggcagaaggtaattctgctagctggcattttccctgtaaacgtactctcttctccagcgtctcggcatcacggtaataattggcgtccagtaccagagcgaccacggtattattttccagatccagtaattcgagactatcaaaacagccttcttcgctcaaagtcccagaaacacgtttcgtcacttcaccttgctcatccattaatgtctgagtgaaatcttttaccggaccacgcagcggatcaaaatcgaattcattagagaaactggccatctcaggggtaaaactaagtgttacctctgtgcggtcacatcctgtgaggaatatcgcgagtaagcatggtagtaatttgtatttcacaacagtcaccagagagtagagatgattctcaatcatagtagcaaatacagtactttacacgttaaatgctatgcttaaagaagttatcttcgcgtaaggagcttatgatgaaactcagtacctgctgtgccgcgcttctgctcgccctcgccagtcccgcggtactcgccgcgccgggatcctgtgagcgcatacagagcgatataagtcagcgcattatcaataatggcgtacccgaaagcagcttcacgttaagtattgtacccaatgaccaggttgatcagcctgattcccaggtcgtcggccattgcgctaatgatacgcataaaattctctatacccgcaccaccagcggtaacgtctctgctcccgcgcagtctagccaggatggcgcgcctgccgaaccgcagtaacacattatcgactgaacgccggatatgacaaatccggcgatttgaacatacaacataatcccaccttattactcatacccttctattgatatggattaataattcttaacccaaaatgggtagactccctctattgttagcgcgctaaatattcaatatataaacttttatataacgataaagaacagggagtgagttatgtccaaaaatgaacgaatggtgggcatcagccgcagaacactcgttaaatctaccgcgataggttctctggcgctggctgcaggcggtttttctttgccgtttaccctgcgcaatgcagcagcagcggtacaacaggcccgcgaaaaagtggtctggggtgcctgttccgtcaactgtggtagccgctgtgcacttcgtctacatgttaaagataatgaagtgacctgggtggaaactgacaataccggcagcgatgagtacggcaaccatcaggtacgcgcctgtttgcgcggtcgctccatccgccggcgtattaatcatcccgatcgcttgaattacccaatgaaacgcgtgggcaaacgcggcgaaggcaaattcgaacggattagctgggatgaagccctggatactatcgccagtagcctgaagaaaaccgtcgaacaatatggcaatgaggctgtatatattcagtactctagcgggatcgttggcggcaatatgacccgctctagcccaagtgccagcgcggtcaaacgcctgatgaactgctacggcggtagtctcaaccagtatggctcctacagcactgcgcaaatttcctgtgccatgccctacacctacggcagtaatgatggcaacagcaccacggatattgaaaacagcaagctggtcgtgatgtttggtaacaacccggcagaaacccgcatgagcggtggtggcatcacttatcttcttgaaaaagcgcgcgagaaaagcaacgccaaaatgattgttatcgatccgcgatataccgatacggctgccggtcgtgaagacgaatggctccctattcgcccgggcaccgatgccgcgctggttgcgggtattgcctgggtattgattaacgaaaatctcgttgatcaaccttttctcgataaatactgcgtcggctatgacgaaaaaaccttacccgcagatgcacccaaaaatggtcactataaagcctatattcttggtgaaggtgacgataaaacagcgaaaacgccgcagtgggctagccaaattaccggtatcccggaggaccgtatcatcaaactggcgcgtgaaattggcacagcaaaacccgcttatatctgccagggctgggggccacaacgccaggcaaacggcgaactgactgcacgcgctattgctatgttacctattttgacgggcaatgtcggcatcagcggcggaaatagtggcgcgcgtgaaagcacctataccattaccatagaacgcctgccggtgctggataatccggtcaaaacgagtatctcctgcttcagctggacagatgctatcgatcatggtccgcaaatgacggcaatccgcgacggcgtccgcggcaaagataaactggatgtgcccattaagttcatctggaactacgcgggaaataccctcgttaatcagcattctgacatcaacaaaacgcatgaaattctgcaggacgaaagcaaatgcgaaatgattgtggtcatcgaaaactttatgaccagtagcgcaaaatatgccgacattctgctgccagacctgatgaccgttgagcaggaagatattattcctaacgactacgccggtaacatgggatatctcattttcctccagcctgtcaccagcgaaaaattcgaacgcaaaccgatttactggatcctgagtgaagtcgcgaaacgtcttggacctgacgtctatcaaaagttcacagaaggtcgcacgcaggaacaatggttacaacatctgtacgccaaaatgcttgccaaagatccggcgttaccgtcttacgacgaactgaaaaaaatgggtatctataagcgtaaagatcccaatggccattttgtcgcctacaaagcatttcgtgacgaccccgaggcaaatccacttaaaacgccttccggtaagattgaaatttattccagcaggctggcggaaattgcccgtacctgggaactggaaaaagatgaagtgataagcccattgccagtttatgccagtacctttgaaggctggaactcccctgaacgtagaaccttcccactgcaactgtttggtttccattacaaatcccgtactcacagcacctacggcaatattgatctcctgaaggctgcctgccgtcaggaggtgtggatcaaccctatagatgcgcagaaacgtgggattgccaacggcgatatggtgcgggtgtttaaccatcgtggcgaagttcggctaccagccaaagtaacaccacgtattctccctggagttagcgctatgggccagggagcctggcacgaggccaatatgtctggcgataaaatcgaccatggcggctgtgtgaatacgctaaccactctgcgccctagtccactggcgaagggaaacccgcagcacactaatctggtcgagatcgaaaaaatataacccacgacaaccataaattctggcatgacattttgtttgaaaagcaataagtgagtaatgatgaaaatccataccacagaggcgctcatgaaggctgaaatcagccgtagaagtctgatgaaaacctccgcacttggcagtcttgcgctggcaagcagtgctttcactctgccattttcccaaatggtccgggcggcagaggctccggtagaagagaaagcggtctggagttcctgcaccgttaactgcgggagccgctgtctgttacgtttgcatgtgaaagatgacaccgtgtactgggtggagtctgatacgacaggtgacgacgtctacggtaatcatcaggttcgagcgtgtttacgcgggcgctctatccgccgacggatgaatcatcctgataggttgaaatatcccatgaagcgcgtcggcaagcgcggtgaaggtaaatttgaacggataagttgggacgaagccctggataccatcagtgataatcttcggcggatcctgaaagattacggcaatgaggctgtacatgtcctgtacggaacaggcgtagatggcggaaacatcaccaacagtaacgtcccgtaccgtctgatgaactcttgcggtggttttctcagtcgctatggcagctacagtaccgcacagatcagtgccgcaatgagttatatgttcggtgccaatgatggcaacagcccggatgatatcgccaatacgaaactggtcgttatgttcggaaataacccggcagaaacgcggatgagcggcggtggtgtcacttactacgtcgagcaagcccgcgaacgtagtaacgcacgcatgatcgtcatcgatccacgttataacgacactgctgccgggcgtgaagatgaatggctgcccattcgccctggcaccgatggcgcactggcctgtgcgattgcctgggtactgattactgaaaacatggtcgatcagccatttctcgacaaatattgtgttggttacgatgaaaaaacgctgcccgccaacgcaccacgtaacgcgcattataaagcctatattctgggcgaagggcctgacggcatagctaaaacgccggaatgggcagcaaaaatcaccagcatcccggcagaaaaaattatccagttggcacgagagatcggtagtgcaaaacctgcttatatttgtcagggttgggggccacaacgacattccaacggcgagcaaacatcccgcgctattgccatgctttccgttctcaccggcaacgtcggcataaacggcggcaacagtggcgtacgcgaaggtagctgggatctgggggtagaatggttcccgatgctcgagaatcctgttaaaacgcagatttccgtctttacatggacagatgccatcgaccatggtacggaaatgaccgcgacccgtgatggtgttcgtggaaaagaaaaactggatgtccccatcaagtttttatggtgctacgccagtaacacattgatcaatcaacatggcgacatcaatcacacccatgaggtgcttcaggatgacagcaagtgcgagatgattgttggcattgaccacttcatgacggccagcgctaagtattgcgatatcctgttgcccgacctgatgccaacagagcaagaagaccttatctctcatgaatctgcagggaatatgggctatgtgatcctcgcccaacccgcaaccagtgcaaaatttgaacgcaaacccatctactggatgctgagtgaagtcgccaaacgcttaggaccagacgtttatcaaacctttactgaaggtcgcagtcagcatgaatggatcaaatatctccatgcgaaaacgaaggaacgtaaccctgagatgcccgactacgaggagatgaaaacgaccgggatctttaagaaaaaatgcccggaagaacactacgtcgctttccgcgcattccgtgaagatccacaggcaaacccgttgaaaacacctagcgggaaaatcgaaatttattctgaacgactggcgaagattgcagatacctgggaattgaaaaaagatgaaattattcatccccttcctgcgtataccccaggttttgatggctgggacgatcccctgcggaaaacctatccactgcagttaacgggcttccattacaaagcgcgtacccactccagctacggcaatattgatgtgttacagcaggcctgcccacaagaggtgtggatcaaccccattgatgctcaggcacgcggtatccgtcatggcgataccgtgcgggtatttaacaataatggagaaatgctgattgccgcaaaagtgactccgcgtattctgcctggcgttaccgccatcgggcaaggtgcgtggcttaaagcggatatgtttggtgaccgggtcgatcacggcggcagtatcaatattctgacctctcaccgccctagtccgctggcaaagggaaacccgagccacagcaatcttgtccagatcgaaaaggtttaaggagtagcccatgaccacacaatatggattttttatcgattccagccgctgtactggctgtaaaacctgcgaactggcgtgcaaagattttaaagatcttggcccggaagtcagtttccgccgtatttatgaatacgctggcggcgactggcaggaagataatggcgtctggcaccagaacgtgttcgcttattatctctccatctcctgtaaccattgcgatgaccccgcatgtacaaaagtctgccccagcggcgcaatgcataagcgtgaagatggctttgtggtggttgatgaagatgtttgtatcggctgccgctactgccacatggcttgtccgtacggcgcgccacagtacaatgctgaaaaagggcacatgacgaagtgcgatggttgttatagccgcgtcgccgaggggaaacaacccatatgtgtcgaatcctgcccgctgcgtgcacttgagttcggtccaattgaagagctgcgccagaagcacggcactcttgctgccgtcgcgccactgccgcgcgcgcatttcacaaaacccaatatcgttatcaaacctaacgccaacagccgcccgaccggcgataccactggttatctggctaatccggaggaagtgtaaaatgggaaatggatggcatgagtggccactggttatctttaccgtattgggtcaatgcgtagtaggcgcgctgattgttagcggaattggctggttcgccgccaaaaatgacgcagaccgtcagcgtattgtccgtggcatgtttttcctctggctgttgatgggcgtcgggtttattgcctctgtcatgcacctgggaagcccactgcgggcgtttaactccctgaatcgaatcggagcttctggtctgagtaacgagattgctgccggttccatattttttgccgttggcggattatggtggctggtggcagtcatcggtaaaatgccgcaagcgttggggaaactctggttacttttcagcatggcgctcggcgtcattttcgtctggatgatgacctgcgtgtatcaaatcgacaccgtgccaacctggcataacggttacactacgctggctttcttcctgacggtattgttgagcggtccaatacttgctgccgcaattctgcgggcagctcgcgttacatttaataccacaccatttgccatcattagcgttctggcgctgatcgcttgtgccggggtgattgtgctgcaaggtttgtctctggcgtctattcacagttccgtgcaacaagccagcgcactggtaccagattacgcctccttacaggtctggcgtgtggtattgttatgcgcaggtcttggatgctggctttgcccgctcattcgtcgccgtgaacctcacgttgccggacttattctggggctaatcctcatacttggcggtgagatgatcgggcgtgtgctcttttatggcctgcacatgacagtaggaatggctattgcaggttaacaaattggtgcggggcaacccgcacatttcaggatgttaggaatgacccattttagtcagcaagataatttttctgtcgcggcgcgcgtgttgggcgcgctgttttattacgctccagagagtgcggaagccgcacctctggttgcggtactcaccagtgacggctgggaaactcagtggcctctaccagaagcgagtttagcgccgctggtgacggcttttcagacacagtgtgaagagactcacgcccaggcctggcagcgtttgtttgtcggcccgtgggcactgccgtctccgccgtgggggagcgtctggctggatcgcgaatctgtgctgtttggcgatagtacattggcacttcgtcagtggatgcgcgagaaaggcattcagtttgaaatgaagcaaaacgaaccggaagatcattttggtagtctgctgttgatggctgcgtggttggcggagaatggtcgccagacagaatgcgaagaattgctggcatggcacctttttccgtggagtacacgttttcttgatgtttttatcgaaaaagcagaacaccctttctaccgtgcactgggtgaactggctcgcttaacgctggcgcaatggcaaagtcaactgttaattcctgtcgcggttaaaccgctgtttcgataagatcaccgtaatattgccggatggtgacgattacgcgcaatccggcaataataggttacagtgtcacgtttttttatctcttaaagcacgcactgcttttgcggctggcctcttttgccgcaaaatagtcgcccgtgtttcattgcccatttctgctcatgcatcatctacacatctatccggatctgcgcactatgttccaccgtctgcttatcgcaacagtcgtcggtattctcgcggcctttgccgttgccgggtttcgtcatgcgatgctgctactggagtggttgttcctcaataatgactccggcagtctggtcaatgcagcgacaaacctttccccctggcgacggttgctaactccggcgctcggcggactggcggcgggtttgttgctgatgggctggcagaaatttacccaacaacgccctcatgcgccgaccgattatatggaagcgttgcaaaccgatggacagttcgattacgcagcaagcctggttaaaagccttgcctctctgctggtagtaaccagcggcagtgcaattggtcgcgaaggtgcgatgattcttttagctgcccttgccgcctcctgttttgcccaacgttttacgccacgccaggagtggaaattatggatcgcctgtggggccgcggcgggaatggctgcggcctatcgtgccccgcttgctggcagtttatttatagccgaagtgctgtttggcactatgatgttggcctctctcggcccggtgattatttccgccgtcgtggcattgctggttagcaatctgattaatcatagcgacgcgttactctacaacgtacaactcagtgtgacggttcaggctcgtgactatgcgctgattatcagtacaggtgtgctggcaggtctgtgcggaccactgttgttaacgttaatgaacgcctgtcatcgtggatttgtgagtctcaaacttgcgccgccctggcaactggcactaggcgggttgatcgtgggtctgctttccctgttcacacctgcagtgtggggcaacggctatagcaccgtacaatcctttttaaccgccccaccactgttaatgatcattgccgggatcttcctttgtaaactgtgtgccgtgctggcgagtagcggttccggcgcacccggtggggtctttacaccgacgctatttatcggtcttgccattggcatgttgtatggtcgtagcctgggattatggttccctgatggcgaagaaattacacttttactcggattgaccgggatggcgacactgttggcggcgaccacgcacgcgccgattatgagcacgttgatgatatgtgaaatgaccggggagtatcagctactccccggtttattgattgcctgcgtaattgcgagcgtaattagccggacgttacaccgtgactctatctaccgccagcacactgcgcagcatagctaagcggatgtattgccccagttcacgctgttcggcgcgcggcagataaggcagttcaccaatgagcggtgccggaagttttttacccagcacatcaatgatttccgcataatgcgccagtcctgggttgattcggttagccacccagccaatgagcggcagcccgtcgttggcgatcgcctgagctgttagcagtgcatggttaatgcaaccttcctgaataccgacaaccatcaacaccggcagttgttcctgcactacccattcagagagtggacgcaaatcattcatcagactgcgccagccgccagtcccttctaccacgacatgatcgactttttcggtcaggtttgccaggccgttactaatgagggtgtaattgattgggcaactgtgcgccacgctactttcttcttcgcttaacgcgataggattaactgcttcataaggcagttcgatggtactaacactctgcaacaccagggcatctttattacgcagcccttcgggtgtctctttgctccccttcgctacgggtttatatcccgcaaccgtttttccctgggaggctaacgcttgtagcaatgcgcgggaaaccaccgttttccctacagaagtgtctgtaccggtaataaagaaacgcttcagcatcactaactccaccgttatgcttcacaaatataaaccaggaaaataattaaccttgaaagtctaagttatgctttcctggcccaaattgagatagcgcaaattttggtagaacagttaaaaaatgttaaccctgcaacagacgaatcaacaaagaaccgttatacatcgcgtcttttaccagtgcagcgcctgccatcgtgccctggttagaaaactgagtactctcaacgctgatgtgctgactatacgcaggaagggcctgctgacggatgctgtcactgatgaccgggaagaggatatctgccgctttacttaacggactgccaatcagtattttttgtgggttaaataaattcaccatgatggcaagaatgcgcccgacatgcgcgcccaccccggtaatgatgtcttttgccagtagatcgccgcgcaatgccgcctgacacaaactgtccacggttaacggttgtccatgtaacatgctgctcatggattgattaagacgcagctgtgccagctcaagaatactgtccacgctggcgatggtttcgaggcagccgtgattcccgcaataacagcgtttcccatacgggtcgacctgtgtgtggcctatttccacgagactactgctgcctgcgtgtagcagatgaccatcggtaatgacgcccgcccccacgttgtgatcgataaccacctgaatcacatcgcgcgccccgcgactggcaccaaacaaggcctctgccatcgtccatgcgctgatatcatgctgaatataaaccggaacgccggtatgctgctccagcgcctcgccgagcggcatctcttttacatcctcgtagaacggcatgcgatgtacaataccattttccgtatcaataattcccggcaaggttatggcaatgctagttagacgctcaagttttttctggtggcggataaaaaactgatcgatatgggaaataatacgatccagcaatggcaagtcatcttttaacgccagttcctggctctcttccaccaccagtttgctgctcagatcgcgcagagcaaggaaaatctccccgcgactaatgcgcagagaaagatagtgccaggcttcagtttcaaccaccagccccaccgccggacggccacggttccccgcttctttgatttccagctcttgcaccaggtgtgcttcgagcatctcacggacaattttagtgatactggcaggagccagttgcgccagacgggaaagatcgatacggctgactggaccaagctgatcaatcaggcgataaaccgcgcccgcgttggtctgctttatttgatcaatgtgcccaggctggttttcagcaaccaccgcatactccctatattttcgcgctccgaaataatctgtaggctatggtgaagcacttcaatacgtgtcgtcaaatttttacttaggcatgtgattaacagcacatttttcgggctttttcgctgaaatttccctcacctgagagcattcagcagatgaatacgaaagttacgcgcagccggactttgttcatgatgtttcggccagaccaaccacatttcagaaaccgcatcctcttcagcaatcggcacccagcgcatttcgttgagctgaacacgtttaaaactcgcaggcaaaatactaacacccagaccggcggaaaccagaccgatgatggtcattgcctcgcccacctcctgagtgatgacgggcgtcaaatggtaacgtcgcatcagcccgagaatatcgtcatacagccctgtcccgacgtgcggatcaaaaaagacaaagggttctttcgccagttcagccagcgttacattcgggttatttgccaggggatgatcgtgcgggatcatcgccataagcggttcatggacgatgactgcgtgttcaaggctctccggtaacgctgtgttacgcagcaatcccatatccagcgttccttcaatgagcggagcgatttgctcgcgagtgttcatttcgcgggtttgtaaatggacatcaggataatcacggcgaaacaggcttaacgtatcggacaccgcccgaataaaaggagcgctgctagtaaaaccaatgcgcaactcccccgcttcaccctgatgcagcctttcagcgcgagcggcagcgtcatccaccatagacaggatttgccgactatctgcaagaaactgttttcctgctgccgtcagcaatacactgcgattggttcgtgccagcagtcgggcaccaatttgttgctccagcgcctgaatctgctgacttagcggcggttggctaatattcaggcgggcagcggcgcgcccgaaatgcagctcttccgcaacagcaacaaagtaacgcagatgacgaagttcaatattcatatttaaaacatcttatttgagattattaatatattagacagaacaattcgattttcctaccctatgtataagcctgatctacaggcatatttagcaaggatttcaagtgagccgtactacaactgttgatggcgctccggcaagcgacactgacaagcaaagcatttctcagccaaatcaatttattaaacgcggtacgccgcaatttatgcgcgtcaccctggcgctgttctctgccggactggcaacatttgcacttctctattgtgtgcagcctatccttccggtgcttagccaggagtttggcttaacccccgcgaacagtagtattagtctgtccatttccacggcgatgttggctattggtttgctgtttactggcccgctatccgatgccattggtcgcaaaccagtgatggtcacggcgctactgttggcctccatttgtacgttacttagcacaatgatgaccagctggcacggcattttgattatgcgcgccttgattgggcttagcttaagtggcgtggcagctgttggcatgacttatcttagcgaggaaatccatcccagtttcgtggcctttagtatggggttgtatatcagcggcaacagtattggcggcatgagcggacgcttaattagcggtgtcttcacggactttttcaactggcgaattgctctggcggcaatcggttgtttcgcgctggccagcgcgttgatgttctggaaaatcctccctgaaagtcgccattttcgcccgactagcctgcgccctaagacgttgtttatcaactttcgtctgcactggcgtgaccggggattaccgttattgttcgcagaaggctttttgctgatggggagcttcgtcacgctgtttaattacatcggctatcggttgatgctctccccctggcatgtcagtcaggccgtggttggcttattaagcctggcttatttgaccggtacatggagcagtcccaaagccggaaccatgaccacccgctatgggcgtggtccagtgatgttgtttagcacgggggttatgctgtttggtttactgatgaccttattcagcagcctgtggctgatctttgccggaatgttactcttcagtgcaggattcttcgcagcccacagtgtagccagcagctggatcggcccccgcgcaaaacgcgctaaaggccaggcctccagcctgtatctgttcagttactatctggggagcagtattgccgggacgctgggtggtgttttctggcataactatggctggaacggcgtcggcgcatttattgctctgatgctggtcattgctctgctggtcgggacgcgtttgcatcgtcgtctgcacgcctgaaaaataagtccggactgcggtaaatacccgtccggacttattgccagctcaaaccaacgttaatagccatcctaaaatagacgaagcgccagccaattcccgcagcgcgtctagcgtcatcaggattataagtacccaaataaacggattcattttgctgtgtgtcatttattactgatgcgcagttattctactgctttgtaagtagtaaaatagttaacccgatcaagactactattattggtagctaaatttcccttaagtcacaatacgttattatcaacgctgtaatttattcagcgtttgtacatatcgttacacgctgaaaccaaccactcacggaagtctgccattcccagggatatagttatttcaacggccccgcagtggggttaaatgaaaaaacaaattgagggtatgacaatgaaaaaagtattagctctggttgttgccgctgctatgggtctgtcttctgccgcctttgctgcagagactacgaccacacctgctccgactgcgacgaccaccaaagcagcgccggcgaaaactacacatcataaaaaacagcataaagcagcacctgcccagaaagcgcaggcggctaaaaagcatcataaaaatacgaaagctgaacagaaagcccctgaacaaaaagcgcaggcagcgaagaaacacgccaagaaacacagccatcagcaaccggcaaaacctgctgcacaacccgcagcgtaagttttcaacagtaatgctggcgcgccccctcgcgcctgaaaattacggtgctaagcgggtaacgtttagcaccgcctttagcggagggtagtatggtgggccgttatcgctttgagttcattctgatcatccttattttatgcgcactgattaccgcccgtttttatctttcctgattgtagttatctgattttactcccactttcatcccgtcccgtctatagtatttatgagggtttgcttttaataatcataattacccaccagagtgtgatatgcgtacaaccattgctgtagtgttgggtgcaattagtttgacgtctgcttttgtgtttgcagataaaccagacgttgccagaagcgcaaacgatgaggtcagcaccctgttttttggtcatgatgatcgtgtgccagtgaatgacacgacccaaagtccgtgggatgcggttgggcaactggaaacggccagcggcaatttatgtacggcgacgctgattgcacccaatctggcattaacggcaggacactgtttattgacacctccaaagggtaaagccgataaagcagtggcgctgcgttttgtgagtaataaaggtctttggcgctatgagatccacgacatagaaggccgcgttgatccgacactgggaaagcggttaaaagcagatggggatggttggattgtacctcccgcagccgcgccgtgggacttcggattgattgtgctacgtaatcccccttctggcattacgccgttgccgttatttgagggagataaagccgcgcttaccgccgcattaaaagcggcaggtcgtaaagtgactcaggcaggctaccctgaagatcatctcgatacgttgtacagtcatcaaaactgtgaagtgactggctgggcgcaaacgagcgtgatgagtcatcagtgcgataccttgccgggtgacagcggtagccctctgatgttgcataccgatgacggctggcaattaattggggtgcaaagtagcgctcctgccgcgaaagatcgctggcgcgccgataaccgggccatttctgttaccggttttcgcgacaagctggatcaactgagccaaaaataatgttcaaacgctgcccgacagcgcgggcagcgtcttcatcaggcaagtttcaccatgatcattccagccaacagcaagaccaggccaatccagcctttacgatttaaccgttgaccaaacaagatccaacctgcggctaacgtggcggcaataccaaacccgccccacaatgcataagcgacagacaagtcgatccctttaacggcttgagaaagcgcactaaaggcagccagcaccgccgccagggagagcaagccaaatattttgcgacgaaagccgtcagaaaatttcaaaaagacgttagcaacgatttccagcacgattgccaatgccagccaggcggcgtgaacccattcaaactgcgccatggttcacctccagttcaggtttacgcgctttacgggtaccactttttatcaacacaatcccggcgaccagggtggttaacccggcaattttcatcaggcttaaactttcgtcgaataacaaaacgctaaacaaggtaataaataaaataccgataccttcccacagcgcataagctacgcctaaggcgatttttttaacggcgaaagagagaaatatatagctcagagaaatcatcaccagcattaaaataaagccgccatttccctcactgacgctcgcccatttcatactcagcgtaccggtaatttctgtagcaatagccagacctaataaaatccaataaatatacattgtccttctcctgcaagagaattattttaattttcgcttaattcagcgaaaccaaagtaaagtggtcaagccccgcgcatagcgcaagctttggcagaagaaaggactaaagcgcgttgcgccagtgctgctcacctacgagcaagatagtggatgaggtacgaagatgggtaaatgtagaaaataacgtcctgaacaaattgtccataatattacaattatccgcagtgttgcttctcgtcatcgcggatgataattgtcctcggtagttgaacacgcctgatttgtatcatagcttaagaattaactcaaaatattttcacttctttacctgagcggtttgattttcgttatgatgacggagcgaaaaagacattattattagcaaaggaagaaaaaacggggacaagcatggcaaagccgatcatcacgctcaatggcctaaaaatcgtcattatgttgggaatgctggtcattattctctgcggtatccgttttgccgccgagatcatcgtgccgtttattctcgcattatttattgctgttattcttaacccgctggtgcaacacatggtccgctggcgtgtgccgcgtgtactggcggtgagcattttgatgaccatcatcgtgatggcgatggtgttgctattagcttatctgggttccgcgctcaacgagttgacgcggacgttaccgcaatatcgcaactctattatgacgccgctgcaagcgcttgaaccgttgttgcaacgcgtagggattgacgtcagtgttgaccagctggcgcattatattgatccgaacgcggcgatgacgttgctcaccaacttattgacgcagttatctaatgccatgagtagtatatttttattgctgctgacggtgctgtttatgctgctcgaagtgccacaattgcccggaaaatttcagcaaatgatggcgcgtccggttgaagggatggcggcgattcaacgtgcgattgacagtgtttctcattatctggtgctgaaaacagccatcagcatcatcaccggcctggtcgcctgggcgatgctcgccgcactcgatgttcgcttcgcttttgtctggggattgctggcctttgcgcttaattacatcccgaatattggtagtgtcctcgcggcaatcccccctatcgctcaggtactggtgtttaatggcttctacgaagcgttgctggtgctggcgggatatctgctgattaatctggtcttcggcaatattctggagccgcgtatcatggggcgtgggctggggctttccacattggtggtatttttgagcttgattttttggggatggttgttaggaccggtgggtatgctgctttccgtgccgttgacaattattgtcaaaattgcgcttgaacaaacagcgggaggtcaaagcatcgccgttctgttaagcgatctcaataaagagtgacggcctcagcagaggccgtcagggttacagagctttcaggattgcatccacgctggctttggcgtcaccaaacagcatgtgggtgttttccttgaagaacagcgggttttgcacaccagcatagccagtgttcatgctacgtttaaagacaatcacgttctgcgctttccacacttccagcacaggcataccagcaatcggactcttcggatcatcctgcgccgccgggttaaccgtatcgttagcaccaatcaccagtacggtatcggtatcagcaaagtcatcattgatctcgtccatttccagcacgatgtcatacggtacttttgcttcagccagcaatacgttcatatgtccaggcaaacgccccgcgaccgggtggataccgaaacgcacattaataccacgagcgcgcaatttctcagtaatttcagcgacaggatattgcgcctgcgcgactgccatgccgtaccccggagtaatgatcacactatgggagtttttcagcagttccgctgtctcttctgcggtgatttcgcggtgctcacccacttcctgatcatcgccagtagaagagccgtcggtgccgaaaccacccgcaataacgctgataaaggaacggttcatcgccttacacataatgtaagaaaggatagccccgctagaaccgaccagcgcaccggtcacaatcagcaggtcgttgctgagcataaagcccgcagccgcagccgcccagccggagtagctgttcagcatgctcaccaccactggcatatctgcaccaccgatggaggcgactaaatgccagccgaataccagcgcaattgcggtcattatcagcaatgccagcacttgcaggccgacgctgtccgtgcgaacaaatacaatcagcagcaggaaggaaacgaccagagccgccaggttcattttgtgacggtttggcagcatcaatggtttagagctaatcttgccacacagtttgccgaacgccaccacgctacccgtgaacgttaccgccccgatgaagataccgaggaacacttccgtcaggtgaatattgaccagaatcggtgccattcccgcgtcatgatgcagatagctgttaaagccaaccagcactgccgccagacccacgaagctatgcaggatcgccaccagttctggcatttcggtcatttcaactttcttcgccagacggataccaattgccccaccaatgaccatcgccagcaagatccagccaacattacccgtatccggtccaaaaatggttgcgattaacgcaatcgccatcccggcgataccgaagttgttaccctggcgagacgtttcatgtttgctaagaccggccagactgaagataaacaggatcgcggcaacaatgtatgcagctgtaactaatcctccagacatatgttaccccttaatttttgcggaacattttcagcatgcgctgagtcacggtgaagccaccgaaaatattaatgctggctataagcaccgcgataaaactaaggaagctaacccagccgccctggccaatctgcaacagtgctccgacaacaataatcccactaatcgcgttggtgacgctcatcaacggtgtatgcagcgcgtggcttacattccacaccacgtaataaccgacaacgcaggccagcgcgaaaacggtgaagtgcccaaggaattctttcggcgcaacgcttgccatccagccaaaaagaatgattgccagcgccatcaacgcgtatttacgccacggactgcaggtacatttttcctcagttttcacttccggtgccgctttttgtgccgcctgcggctgagcacttacctgaatcggcggtgccggccaggtaatttcgcccgcacggatcacggtcacgccgcgaatcaccacatcatcaaaatcaacagtgatattgccgtctttctctttgcacaacagtttcagcagattaacgaggtttgtgccgtaaagctgactggattgcgtcggcagacggcccggaagatcggtataaccaatcactttgacaccattttccgtagtgaagatttcacccggcacggtgtattcacagttgccgccgttttgggctgccaggtcgacaatcacactgcccgccttcatggagtcaaccatttcacgggtaattagcttcggcgctggtttgcctggaataagcgcggtggtgacaatgatatcgacctcttttgcctgggcggcaaagagttccatttccgctttgatgaacgcgtcgctcatcactttggcatagccatcgccgctgccagcttcctctttaaaatccagctcgaggaattccgcgcccatactttgaacttgttctttcacttccgggcgggtgtcgaatgcacgcacaatcgcgccgagactgtttgctgcgccaatggcggccagacctgcaacacccgcaccaatcaccatcacttttgccggtggcactttcccggccgcagtaatttgcccggtaaagaagcgcccaaattcatgtgccgcttcaacaatggcgcgataaccggcgatgttcgccatgctgcttagtgcgtccaggctttgtgcgcgactgatacgcggcacagagtccatcgccatcacggtcacgttacgttccgcaagtttttgcattaattccggattctgcgcaggccagataaaactcaccagcgttgtcccaggattcagtaacgcaatttcatcatctaacggcgcattgaccttcagaatgatctcactctgccagacgctattcccttctacaatttcagcgcccgcttgcacaaacgctttatcgtcaaaacttgccagttgacccgcgccgctctctaccgcgacggtaaaacccagtttcagcagctgttccactgtttttggcgttgctgcaacacgggtttcattggttaaccgttctcttggtatgccaattcgcatgatattcccttccatcggttttattgatgatggtttgcctgtgtcaggagccacacaagctgctcatgtacgagctaaatgttactccgttaaaataaattagtaacaaacgccctataacgtactgaaaattatgcctgtgatctagcgccaaaaatcagtatttcggcgtgaactcgcaaaatattaacgattcagccgtgatagtgggataaacaccttagaacgccggataaagactgataattgtcttcgacggtcgggtaaaacgagacatcgccccggcacgaatcactacttaacattaaattaacttatacaattcagttgcttcagtagtaatgatgctgatacggctgttttttaagcatagacggtcatttgagcaggattaaaattggcttaaggaatgtgatatgaaaaatgacgcagacagttacaccgtttaaatgcaataatcagccacgtttctcgttaataacaataccagtacctggtttgcgcaaggcgaaggattatttttatgaagcttaagaacaccctcctggcgagcgcactgctttctgctatggcattctccgttaacgcagcaacagaactgacaccggagcaagcggcagcggttaaaccttttgaccgtatagtggttaccggtcgttttaatgctattggcgaagcggtgaaagccgtttctcgtcgcgcagataaagaaggtgccgcctctttttatgttgtcgacacttctgattttggtaacagcggtaactggcgtgtggtcgctgacctctataaagccgatgctgaaaaagcagaagaaacaagtaatcgcgtaattaacggtgttgtcgaactgccgaaagatcaggctgttctgattgaaccgtttgacacggtcaccgtccagggcttctatcgtagccagccagaagtcaatgatgccatcaccaaagcggcaaaagcgaaaggtgcctactctttctacatcgttcgtcaaatcgatgccaaccagggcggcaaccagcgtattactgcattcatctataaaaaagatgctaagaaacgtatcgtccagagcccggatgtgatcccggcagattccgaagcaggacgtgcagctctggctgccggtggcgaagccgcgaagaaagttgagatcccgggtgttgcgactaccgcaagtccaagttctgaagtcggtcgcttctttgaaacccagagtagtaaaggcgggcgttacaccgtcacgctcccggatggcactaaagtcgaagaactgaacaaagcgaccgcagcgatgatggtcccgttcgacagcatcaaattctctggcaactacggcaacatgaccgaagtctcctatcaggttgcgaaacgtgccgcgaagaaaggtgctaagtattaccacatcacccgccagtggcaggaacgtggtaataacctgaccgtcagcgcagatctgtataaataactattcagttactcctataaggcggcttgatgccgcctttcgcatttttagtcacaaatttccccgcgaccattgcatgcagacacatctcttcgtaaaatcccgcgcttcagtggcaaactccatttttatgcgttttgccctaatatttattcttcttatcacgttttaatcactggatatcgatggaaaagaaactgggactgagcgcactcaccgcgctggtattaagcagtatgctgggcgcgggtgttttcagtctgccgcaaaatatggcggcagttgccagcccggcagcactgctcatcggctggggtattactggcgctggcattttattgctggcctttgccatgctgatcctcacgcgcattcgtcccgaacttgacggcggtatctttacctatgcccgcgaagggtttggcgagctaatcggcttttgttccgcatggggatactggctgtgcgcagtcatcgccaacgtctcctatctggtgatcgttttttccgcgttaagcttttttacggacacgccggaattgcgcctgtttggcgatggtaatacctggcaaagcatagtcggtgcaagcgctttattgtggattgttcactttttgatcctgcgcggggtgcaaaccgctgccagcattaacctggtggcgacactggcaaaattgttgccgctgggtctgtttgttgtgctggcgatgatgatgttcaaactggataccttcaagctcgacttcaccggacttgcacttggcgtacccgtttgggaacaggtgaaaaacaccatgctgatcaccctgtgggttttcattggtgtggaaggtgccgtggttgtttctgcgcgtgcgcgtaataaacgtgatgttggcaaagcgacactgctggcggttctctccgctctgggcgtttacttgctggtaacgctgcttagcctgggtgtggtggcacgtcctgaactggctgaaattcgtaacccgagtatggccggtctgatggtggaaatgatgggaccatggggcgaaatcatcatcgctgccggtttgatcgtttccgtttgcggcgcgtacttaagctggaccatcatggcagcagaagtaccgttcctggccgccactcataaagcattcccgcgcatttttgcgcgccagaacgcacaagctgcgccatccgccagtctgtggttgaccaacatctgcgtgcaaatttgtctggtactcatctggctgaccggttccgattacaacacgttgctgaccatcgccagtgaaatgattctggtgccctatttcctggtcggcgcgttcttgctgaaaatcgcaacccgtccactgcataaagcggtaggtgtcggtgcctgcatttatggcttatggttattgtacgcctctggtccaatgcacttgctgttatccgttgttctgtatgcaccggggctgctggttttcctgtacgcgcgcaaaacgcatacccatgataatgtactgaaccgtcaggaaatggtgctgattggcatgctgttaattgccagtgttccggcgacctggatgctggtgggataacgttcatcccatcgttggatagcaaaggagataacgatgggtaaaacccagcccttgccaatattaattactggcggaggtcgtcgcatcggcctcgccctcgcatggcatttcattaatcaaaagcaaccggtgattgtcagctatcggacacactatccagccattgatggactgattaatgcaggtgcgcagtgtattcaggctgattttagcaccaacgacggtgtgatggcgtttgccgatgaagtactaaaaagcacccatggtctgcgtgctattttgcataacgccagtgcgtggatggcggaaaaaccgggtgcgccactggccgacgtactggcttgcatgatgcagatccacgttaataccccatacctgctcaaccatgcgctggaaagattactgcgtgggcacggacacgccgccagcgatatcattcactttaccgattatgtggtggagcgcggtagcgacaaacatattgcgtatgctgcaagcaaagcggcactggataatatgacccgcagctttgcccgcaagctggcaccggaagtgaaagtgaattctattgcgccaagcctgatcctgtttaatgaacatgatgatgccgaatatcgacaacaggcgctgaataaaagtctgatgaaaaccgcgcctggcgagaaagaagtgatcgacctggtcgattacttacttaccagttgctttgtcaccggacgcagtttcccacttgatggcggtcgtcatctgcgttaatgcagctttatccagcatataatcaacacccatgcgcttatcccccaacacgcaacagaaccaacaaaagcggcgggcaagcgcatcattccggtgaaataccacaggctcaccaggtaaacaaaatagggaataatgctccacatactaaaaatgatggttgcgcgtaaggcttcaatgccgcgttcgctggcaacaatataatgcgcgataagcgcaaaggtcgggaaaagtggaatcagcccggcgatataataatttttcgtttttgctaaaacaccaatcaacagcactaccagcgcaccgagcgcggctttgattaccagccccatctttttaccttaacacttccataacaagtcatcagtagaatacctgatgaaaacttgtttagaaacgattgatagtaagtaaaaacagcgcggtgtattgtgacgtttttatatctaccgtgaatgttatgaacactatcgtatttgtggaagatgatgcggaagtcggtagtctgattgccgcgtacctggcaaaacatgatatgcaggttaccgtagagccgcgcggcgaccaggccgaagaaaccattttgcgagaaaatccggatttggtgttactcgacatcatgctaccaggcaaggacggcatgaccatttgtcgtgatttacgcgcaaagtggtctggaccgattgttcttctaacctctctcgatagcgatatgaaccacatcctggcactggaaatgggtgcctgcgactatattctcaaaacgacgccccctgctgttttgctagcgcgtttacgtttgcatttgcgtcagaatgagcaagccacactgaccaaaggtcttcaggaaacgtctctgactccctacaaagccctgcatttcggcacgttgaccatcgatcccatcaaccgcgtagtcaccctggctaacactgaaatcagcctcagcacagctgatttcgaattattgtgggaattagctacccatgccgggcaaatcatggaccgcgatgcattgctgaaaaatttacgcggcgtcagttatgacggactggatcgtagcgtggacgtggctattagccggttaagaaaaaaactgctcgataacgccgcagaaccttatcgcattaaaactgtgcgtaacaaaggctatctttttgcgcctcatgcatgggaataagcgatgaaaaaactgtttatccagttttacctgttattgtttgtctgcttccttgtgatgtctctgctggttgggctggtgtacaaatttaccgccgaacgcgcgggcaaacagagcctggatgatttgatgaacagtagcctgtatctgatgcgcagcgaattgcgtgagatccccccacacgactggggtaaaactctgaaagagatggatttaaatctctctttcgatctgcgtgtcgagccactgagtaaataccatcttgatgatatttccatgcaccgactgcgtggcggcgaaattgtcgccctggacgatcagtacacgtttttgcagcgtatcccgcgcagccactacgtgctggcagttggtcctgttccttatctttattatctccatcagatgcgattgctggatatcgccctgatcgcttttattgctatttccctcgcctttccggtgtttatctggatgcgtccgcactggcaggatatgttaaaactggaagcagcggcgcaacgatttggcgatgggcatctcaatgaacgtatccactttgatgagggtagcagctttgaacgacttggcgtcgcatttaaccagatggcggacaatatcaacgccttaattgccagcaaaaaacagcttattgacggtatcgctcacgaactgcgaacaccgttagtgcgcctgcgttatcgactggagatgagcgataacctgagcgccgccgaatcccaggcgttgaatcgtgatatcagtcaacttgaagctttaattgaagagctgctgacttatgcccgactcgatcgcccacaaaacgagcttcatcttagcgaaccagacctgccgttgtggctgagtacgcatctggcagatattcaggcagtaacgcccgataaaacggtacggataaaaacgctcgtgcaaggccattatgcggcgttggatatgcgcttaatggagcgcgtgctggataatttgctcaataacgccctgcggtactgccatagtacggttgaaaccagcctgctactgagcgggaatagagcgacattaattgttgaggatgatggcccagggattgccccagaaaaccgcgaacatatctttgaaccttttgttcgcctcgatcccagccgggatcgcagtaccggcggctgcgggctggggctggcaattgtccactctatagcactggcaatgggcggtacggttaattgtgacaccagcgaactgggtggtgcccgcttcagctttagctggccgttatggcataacatcccgcaatttacctctgcctgacactacgcgcacgatggtcaagtcaccacgactgtgctataaaataagtatgttgtaactaaagtggttaatattatggcgcgttacgatctcgtagaccgactcaacactacctttcgccagatggaacaagagctggccatatttgccgctcatcttgagcaacacaagctattggttgcccgcgtgttctctttgccggaggtaaaaaaagaggatgagcataatccgcttaatcgtattgaggtaaaacaacatctcggcaacgacgcgcagagcctggcgttgcgtcatttccgccatttatttattcaacaacagtccgaaaatcgcagcagcaaggccgctgtccgtctgcctggcgtgttgtgttaccaggtcgataaccttagccaagcagcgttggtcagtcatattcagcacatcaataaactcaagaccacgttcgagcatatcgtcacggttgaaagtgaactccccaccgcggcacgttttgaatgggtgcatcgtcatttgccggggctgatcacccttaatgcttaccgcacgctcaccgttctgcacgaccccgccactttacgctttggttgggctaataaacatatcattaagaatttacatcgtgatgaagtcctggcacagctggaaaaaagcctgaaaagtccacgcagtgtcgcaccgtggacgcgcgaggagtggcaaagaaaactggagcgagagtatcaggatatcgctgccctgccacagaacgcgaagttaaaaatcaaacgtccggtgaaggtgcagccgattgcccgcgtctggtacaaaggagatcaaaaacaagtccaacacgcctgccctacaccactgattgcactgattaatcgggataatggcgcgggcgtgccggacgttggtgagttgttaaattacgatgccgacaatgtgcagcaccgttataaacctcaggcgcagccgcttcgtttgatcattccacggctgcacctgtatgttgcagattaacgcccggctttcatactgccgaccatctgttctggccgtacccagctgtcaaactcggcttcgctaagataccccagcgcaagggccgcagcttttaaggtcagcccttctttatgcgcttttttggcgatctcggcggctttgtcataaccaatgtgggtgttaagcgcagtcaccagcatcaggctttcattgagtaattgattgattcgctcacgattcggttcaatacccactgcgcagtgtttgttaaaactttccatgccatctgccagcaagcgcacgctttgcaggaaattgtggatcaccattggacggaagacgttcagttcaaagttaccggaagcgccccccatgttgatcgccacgtcgttccccatcacctgacagcagagcatggttaatgcctcacactgtgttgggttcactttccccggcatgatactgctgcccggctcattttccgggatactgatttcaccaattccgcagcgcgggccagaggccagccagcggacatcattggcgattttcatcagactcgcagccaaccctttcaacgcgccgtgcgcctgaaccagggcatcacaggtcgccagcgcttcaaatttgttcggcgcggtaacaaacggtgcacaggtaatgactgccagttcatctgctacgcgacgcgcatactccggatgggtatttagtccagtacccaccgctgtaccgccaagagccagttccgctacgtgaggcaggctgtattcgatatgtttgagattatgctcgagcatcgctacccagccggaaatctcctgccccagcgttaacggcgtggcatcctgcaagtgagtacgaccaattttgacgatatcggcaaaagcacgggatttctcattcagtgtctgtgtcagggttttaagctgaggaatgagttgcttgcgcagcgccagcagcgccgcaacgtgcatcgccgtcggaaagacatcgttggaactttggcttttgttcacgtcgtcgttagggtgaactttacgttccatcccgcgcacaccgccgagtaattcactggcccggttagccagcacttcgttcatgttcatgttactttgcgtgccggagccggtctgccagatagccagcgggaattcgtcgtcatgctgtcctgccagtacttcatccgccgcctgacgaatggcgctcgctttctcttcagacaacaagcctaaatcttcattaacttttgccgctgcacgcttggttagcgccagcgcatgaatcagactggtgggcattttctccgtgctaatgcggaaatgctccaggctgcgttgagtttgtgcgccccacagcttatctgccgggacatcaatcgcccccatgctatctttttcgctgcgtactgtattcatgacctgctcctcacctgattaattttttctttctgttttgctttcgttaagcaacttttagctcacttattatttaccatttgataacaaatgtttggtctttcgtgccatgtaaaaaaaccgccccgaagggcggctctgtttatttcacacagcgggtgcattgtgtgagttgtatctgctggaagaagtcatttcctttatcatccacaaggataaacgccgggaaatcttccacttcaattttccagatggcttccattcccagttccggatattcaacacattccaggctcttaatacttccctgcgccaatacagcggccggaccaccgatactgccaaggtagaagccgccgtgttttttacaggcatccgtcacctgctggctgcggttgcctttcgccagcatgatcatacttccgccctgcgcttgcagttgatcgacataagaatccatccgtccggcggtcgttgggccaagagaaccggaggcataaccttccggcgttttggccggacccgcgtagtaaatcggatgatctttgatgtactgcggcagcccttcaccgttatccatccgctctttcagtttggcgtgagcaatatcacgaccgacgataatcgtgccgttaaggcttaagcgtgtagaaacgggatactggctcaactgtgcgaggatctctttcatcggacggttaaggtcaacgcgcaccgcttcgccttctcccgctttgcgcagctcttccgggatatatttgcctggattatgttccagtttttcgatccagatcccctgacggttgatcttcgctttgatattacggtcagcagagcaggagacgcccataccgaccgggcaggatgcgccgtgacgtggcaggcgaatcacgcggatgtcgtgagcgaagtatttaccaccaaactgcgcacccagaccaagattttgcgcttcgatcagcaattctttttccagttccacatcgcggaacgcctgaccgtgctcattcccttccgttggcagttcatcatagtatttcgcggaagccagtttcaccgttttaaggttcgtttctgcagaagttccaccaataacgaacgcaatatgatacggaggacaggccgccgtacccagcgtgcgcatcttctcaaccaggtaatttttcagtttccccggcgtcagtaacgctttggtttcctgatagagatacgtcttgtttgcgctaccaccacctttggcgatacagaggaatttgtattcgtcgccatcaacggcataaagatcgatctgcgctggcagattggtgccggtattcacttctttatacatatccagcggcgcgttttggctgtagcgcagattatcttcgatataagtgttatagacaccgcgcgccagcgccgcttcatcaccaccaccggtccatacacgctgcccttttttaccaacaataatcgcggtgccggtatcctgacaggttggcagaacgcctttcgccgcgatgtcggagttacgcaggaattgcagcgccacatatttatcattttcgctggcctccgggtcacgcagaatgtcggccacctgttgttggtgcgccggacgcagcatgaagctcgcatcatgaaacgcctggcgcgccaacagagttaacgcttcgggtgcgactttcaaaatctcctgcccttcaaattcagatacgctaacgtgttcgctggttagcaggtaatactcagtatcatcttttttgagtggaaaaggagcctgataatgaaagggtttgttactcattgttctctcacttactgcctggtttggttatgctctgggcgggtgttccgttgccctgttaaaagcgagtaacaatatcctacacacttttttaacaaaaactgagactagtacgactttttgcggctccaggttacttcccgtaggattcttgctttaatagtgggattaatttccacattaaaacagggattgatcatgcaaaaactcattaacagtgtgcaaaactatgcctggggcagcaaaacggcgttgactgaactttatggtatggaaaatccgtccagccagccgatggccgagctgtggatgggcgcacatccgaaaagcagtagtcgagtgcagaatgccgccggagatatcgttagtctgcgtgatgtgattgagagtgataaaagcactctgctcggagaggccgttgccaaacgctttggcgaactgcctttcctgttcaaagtattatgcgcagcacagccactctccattcaggttcatccaaacaaacacaattctgaaatcggttttgccaaagaaaatgccgcaggtatcccgatggatgccgccgagcgtaactataaagatcctaaccacaagccggagctggtttttgcgctgacgcctttccttgcgatgaacgcgtttcgtgaattttccgagattgtctccctactccagccggtcgcaggtgcacatccggcgattgctcactttttacaacagcctgatgccgaacgtttaagcgaactgttcgccagcctgttgaatatgcagggtgaagaaaaatcccgcgcgctggcgattttaaaaagcgccctcgatagccagcagggtgaaccgtggcaaacgattcgtttaatttctgaattttacccggaagacagcggtctgttctccccgctattgctgaatgtggtgaaattgaaccctggcgaagcgatgttcctgttcgctgaaacaccgcacgcttacctgcaaggcgtggcgctggaagtgatggcaaactccgataacgtgctgcgtgcgggtctgacgcctaaatacattgatattccggaactggttgccaatgtgaaattcgaagccaaaccggctaaccagttgttgacccagccggtgaaacaaggtgcagaactggacttcccgattccagtggatgattttgccttcagcctgcatgaccttagtgataaagaaaccaccattagccagcagagtgccgccattttgttctgcgtcgaaggcgatgcaacgttgtggaaaggttctcagcagttacagcttaaaccgggtgaaagtgcgtttattgccgccaacgaaagtccggtgactgtcaaaggccacggccgtttagcgcgtgtttacaacaagctgtaagagcttactgaaaaaattaacatctcttgctaagcttattaaaggcttataacaccttcaggcggccagtccgcctgatttcattttatggataatcattatgaataaaagcctggtagcggtaggcgtcattgttgcgctaggcgtagtctggacaggcggcgcatggtatacaggcaagaagattgaaacccatctcgaagacatggtcgcgcaggcgaacgcgcaactcaaactgacagctcctgaatccaacctggaagtgagttatcaaaactatcatcgcggcgtattcagcagccagttgcaactgttggtgaaacccattgccgggaaagaaaatccgtggattaaaagcggtcagagcgtcatcttcaacgaaagcgttgatcatggtcccttcccgcttgcccagcttaaaaaactgaacctgatcccgagcatggcaagtattcaaaccacgctggttaataacgaagtaagcaaaccactgtttgatatggcaaaaggtgaaacgccttttgagattaacagccgcattggttacagcggtgattccagttccgatattagcctcaagccactgaattacgagcaaaaggatgaaaaagtcgcctttagcggcggcgagttccagttaaatgctgacagagacggcaaagccatctccctttccggggaggcgcaaagtggtcggatagacgcagttaacgaatacaaccagaaagtgcagttgacctttaataatctgaaaaccgacggttccagcacgctggcaagttttggtgagcgtgtaggaaatcaaaaactgagtctggaaaaaatgaccattagtgtggaaggcaaagaactggcactgctggaaggcatggagatcagcggtaaaagcgatctggtcaatgacggtaaaacgatcaatagccaactggattacagcctaaacagcctgaaggtacagaatcaggatctgggcagcggcaagctgactttaaaagtcggccagattgatggtgaagcctggcatcagtttagccagcaatataacgcgcaaactcaggcgctgctggcacagccagaaattgccaacaaccccgaactttatcaggagaaagtgacggaagccttctttagcgccctgccgctgatgctgaaaggcgatccggtgattactatcgcgccgctaagctggaaaaacagtcagggtgaaagtgccctgaatctgagcctgttcctgaaagatccggcaacgactaaagaagcgccgcaaacgctggcgcaggaagtagatcgtagcgttaaatctctggatgcgaaactgaccattccggtggatatggcaactgagtttatgactcaggtagcgaagctggaaggttatcaggaagatcaagcgaaaaaactggcgaaacagcaagttgaaggtgcaagtgcaatggggcagatgttccgtctgaccaccttgcaggacaataccatcaccaccagcctgcaatatgctaacggtcagataacgttaaatgggcagaaaatgagcttagaagattttgttggcatgtttgcgatgccagctcttaacgttccggctgtaccggcaattccgcagcagtaattcacggccaaaacgccggagaattttcactccggcgttttcatctgaaaacaaaccagagattgcctgatgcgctacgcttatcaggcctaccttttcctgcaacactttgaatttatgagtttttgtaggctggataaggcgtttacgccgcatccggcataaaaaacgcgcactttgtcaacaatctgaaacgccggagatttttctctccggcgttattttttacttcagcataaagtcatactgaatactcattttcacatcccagtaattcaggcgatcgcccagcgtactgccatcgcgcttttcccgccctttatcggcagcaagaaagaaattcatcccttgtaacggcccttcgctgacccgatagttcataccacctaagatacccgtgccttcaatccgcacatctcgtttactggattcatagccgcgagtcacaatcggtgcaaatgtcagcgtaaattgcggcgttaaacgatagttgacgcccaattgccaggactgcattccttcacggttacgatcaagacttaaactaaagggatagccaatgtcggtatccaccacggcaccattcattgcatggcgcaaataaccaccactgccaaatacacttccccacggcgcattccaggtcaattgtccactaaccaacgccgtttcattgggctggctggtattacgacttaaaccttcgagctgcgcgtaaaagccgagcaactcccctttcaacgtataattcgggtcgagcggtatgcttttctcgagaatactttgtatctgattggaaacatctttctgtacgcttgcccccagagaatagcgactggtatcatcatgccaactggcggctaaaaaagaacgtgcgcgatgtttatcgtattttcccgtctggctgttatacaccccttcatcacgaataccggttgtactatcagtccataaaaatactcgactacgccacattccccacagatcaatatttggtgttaaagcccaataacctaatgctccttcagaaactgtcggtaatgtacgttggctactgccagccattaacggaatacgataaggtaagctaccataactataatccgtcccgaagcgacctaatttaagcaggctattttcactgggttttatttttactgcccccagggcaaagccaaaacttttatcaccatcaagataccaccgggtactcatatcagcacgagcacctaatttataaacataatacgccccgccttcaacgccaataatattggaataataaccactattgaaatcgagcaatcctccctgtacccatgcgtaaatatctcttcccgcgccagcactgggcttatccgccctgcgcaattcgtttttcagtctgatgcgtagtcccgcttcatcgtcagccagttgcgccgcataagcagaggtaaggccagaggcagccgtcaggcaaataacggccatggccactatttttctcatagttgcacctttgatgttctgattatttttattgaatattaattagtgatatcgctgattaattgctgctgcacttttttacgattatcaatttcaaccacgatttctttgaattttttatccgtgagcggataaaaccagataataacgaatgccagtagcataaatccgcaaggtactaaggcaatacttgtgcggatgcccataataacttccggcgtttgcacctgattggcgatatatccgcttaaccccaaaataaaggcaggaatactacctccgattgcctgaccgcatttacgggtaaaactgaatagactataggtgagcccttcaattcgcacgccggtcaggtattcaccgtattctacggtatcagcttccagcgcccacatcacggtcatggtaacgccctgaccaatactagcgatggccaacgcaaccaacgccaccggcagactccagacggaaacccagaagaacagcagataaccgcaggttcccagcaaagcgccaatcaggaaggtattctttttaccgatcctcgcgaccatccccggcaccagcggtgcgcttgccacagtaccaaccaggttttgcaccagtaccagcacagtgaacagcccggtatcatttaacacatagcgcacgtagaacaagctgctggcgctgaccgcaaaggtgctaatcagcacacacagcgcaccgatgcacaacataaacagcgggcgattccgtttcagggtttgcagactgatattcaaactcggctgcgcaacgatacgtaccacattctcacgcgtgcttttgaagcagatgaagtaaagcaccattccggcaatcgccagcacaattgtccagaaatggtatacgctcaccatctcttccgggctggagttcttaatgctcggtcctatcagaaatgccaggcagacaaaggtcaaactagcggcaatcccacgagccgcgcccagacgggcgcgggattgtggttgttgggtcatcgcggtagcaagactaccataaggaatattcaccaggctgtagcaaagcccgaggcccatgtaggtcaaatatgcatacaccactttgctaccatggctccagtcggtcagcacccagaataccagcacgctgaagatcattaacggcgcagtaccgaagagtaaaaacgggcggaattttccccagcgggtattcacactgtccaccactcgtccggcaaagacgtcggcgaaggcatcgaatacccgcaccagtaacagcatggtgcccgccgcagcggcaccgacgccagcgacgtcggtgtagtaactcaacaggaagagcgcccccattgcgaaggcgaagttattggcgacgtcaccgaggctgtagccgacgatggtgcgccaggagagttgttgattcattgtttgcctccctgctgcggtttttcaccgaagttcatgccagtccagcgtttttgcagcagaaaagccgcgctcttcggtttgcggtcgcgagtgaagatccctttcttgttaccgccaacgcgcaatatgccttggctggtcgcaaaatcggcgaaattccatacctgttcaccgacgacggcgctgacgcgatcaaagacgcggtgatacatatccagccatgcacactgatactcttcactccacatgtcggtgtacatactgtgcagcccggctaacgtatccacgccgtattcggtgatgataatcggctgatgcagtttctcctgccaggccagaagttctttttccagtaccttctctgccgtttccaaatcgccgctttggacataccatccgtaataacggttcaggcacagcacatcaaagagatcgctgatggtatcggtgtgagcgtcgcagaacattacattgacgcaggtgatcggacgcgtcgggtcgagtttacgcgttgcttccgccagtggcgcgaaatattcccgtgcaccttgcggacgggtatccggttcgttggcaatactccacatcaccacgcttgggtggtttttgtcacgcgctatcagctctttaatcgcctgtaagtgcgcttgctgagtttccccgttgactgcctcttcgctgtacagttctttcggcttgttgcccgcttcgaaaccaatgcctaaagagaggttaaagccgacagcagcagtttcatcaatcaccacgatgccatgttcatctgcccagtcgagcatctcttcagcgtaagggtaatggctggtacggtaggagttggccccaatccagtccattaatgcgtggtcgtgcaccatcagcacgttatcgaatcctttgccacgcaagtccgcatcttcatgacgaccaaagccagtaaagtagaacggtttgtggttaatcaggaactgttcgcccttcactgccacactccggatgccgacgcgaagcgggtagatatcacactctgtctggcttttggctgtgacgcacagttcatagagataaccttcacccggttgccagaggtgcggattcaccacttgcaaagtcccgctagtgccttgtccagttgcaaccacctgttgatccgcatcacgcagttcaacgctgacatcaccattggccaccacctgccagtcaacagacgcgtggttacagtcttgcgcgacatgcgtcaccacggtgatatcgtccacccaggtgttcggcgtggtgtagagcattacgctgcgatggatcccggcatagttaaagaaatcatggaagtaagactgctttttcttgccgttttcgtcggtaatcaccattcccggcgggatagtctgccagttcagttcgttgttcacacaaacggtgatacgtacacttttcccggcaataacatacggcgtgacatcggcttcaaatggcgtatagccgccctgatgctccatcacttcctgattattgacccacactttgccgtaatgagtgaccgcatcgaaacgcagcacgatacgctggcctgcccaacctttcggtataaagacttcgcgctgataccagacgttgcccgcataattacgaatatctgcatcggcgaactgatcgttaaaactgcctggcacagcaattgcccggctttcttgtaacgcgctttcccaccaacgctgatcaattccacagttttcgcgatccagactgaatgcccacaggccgtcgagttttttgatttcacgggttggggtttctacaggacgtaacataagggactcctcattaagataataatactggtcaacctttaatctgattagttaaccaattctgtgttgcacacagttatctgtgagaaacccatggaagagaaatggaaataaaaagaactgacaccgcgatcaaaaaaccaaaaactgcaatacccacagcgtgatatagatcgcattaatctttaaaacagcgttgacagaagccataaaataagcaaccgaacgttcgttcgagcgtattgggaacgataaactctcatgacatatggctacagtgaatattttggggggaattctccgaagccgggaaggataatttttgcacagagaaattacgatatgaaacgcgggcacagttatcaccagcccgccgaaaaagagagagaatcaggatgcggttaagataccgccaatcatcgcgcgtaatccctgagcaaagctcgcttcacgcgccaggtcttccgcttcgatatcggccagtacaccgtaggtcagatccagcagtaaacgactagtcattgccgtgttgatgtctgggcttatctcgcctttttgctgggcatcacgcatccgctgggcaacaaattccgtgatcgtcatatgcttatttttaagcatggcggcgacctgtgggttacgcatcccttccgccataatttcaaccaccagcgcccgttgtccaaaggcttcatgggtgagagagacaatggactcgaccatatagtcaacgaaatgaatcccttcaatcggttcccggaaacgggccagcgccctctcctggtcctgtaagataatcgcctgaatcaaggcttctttggagatgaaatggtgatagagcgtcccgggactaatggcgcaagatttacagatggctttcatgctggcactgtgaaatccattttcactaaaaatctctctggcagcattgaggatccgggtccgtgtcggttgtgcttcagtctgcatgttatccatcattaaaccattatagttagcgtgaataactagtttaccgcgttgtcaggtgagcgcctatcattgctgttgaatagtgcgaaggcacactctattcgtatacttttcactctgaaattggttaaccaatagccgtgatttggctgccagttatttagcagagacgttgatgagtttatcccggtaaacaacacgcacggttgtttaccggtccgttagtgtattaattgagctcctgtaccccaccaccggagacggtgagaatttgtccgcttacccagctcgcagcagggctgcaaaggaacagcgctgcgttagcaatatcttgcggttggcccagacgtctgatcggcgtgtgctgtaacattttttgttcaatttctggtgtaataacggatttcagggcatcggttaatattgcccccggcgcaatgccatttacccgaatatttttttcacccaggtcaaacgccatatttctgaccagatgactggccgcagctttagaacttgcataggaagtcatgtttatatttttattttctgccgccatagaagtgatggtcagaataacgccaccgccatttttttccatttctggcgcaacaagttgactcagatggaaaaaagaaaacacattcagttcataagcacggcgaaaatccgccattggcatatcaaacggtttaggtccaccgccaccggcgttgttaaccagaatatcaactttacccagcttactgatagcaaagtctgccagtgcagagagttcctgttcggaagtaatatcacaacggcaggcaaatgcctgaccacccagttgttgaatttcgtctacaacatggttagctgcgtcggcgttaatatcactgaccaccacagatgcgccagctgtcgcgaatgtaatggcgatttctttaccaatacctgcacccgcacctgtgatgatggcgcattttccgtcgagtctcaggttgtcagaattaaacacataaacctcctgtgaacttcagtaaaaataaaaggcaccgcctgtgtgccacattttttatcattaaccttgaggaaaggacactaccaggtatagcagataaagagaggattatttcgctgcaatgagccgggcgggaataataagattgcgactatgcgtctcttcatgggtgattttttgcatcatgcgatccgcaagtgtgataccaagttcccgcgctggcgtgctggcccaggtaacaggtatatcatcaagtgtggttggtgtcgcatcggtaaatgccgccaggctaacctgttgctcaaagtaacgatcgactccgctttccccgctttgccgccctgctttgagcaaaccaaaccatgcccccatcgcaatagtttcgttatagcaaaccacggcactgatggtcgggttatgacgtaaaagcgccgtgatagcttccgcggcttgcttctggctggaagtgcactccaacacccaatcgctatgaaacggcaggccaaattttagtagagttgcacaatagcccccaacccgttctgcacgggttaaactggaactttgccctcccagccaggcgatccgctgatgcccattgcgaatgagatgctccgtcaacaactgtgcagcctgcatgttgtccgggcgaaccgtatcaacatcatcaagataactggcacgggaagcgaaaatcaccgggatagctttttcttctgccatccgtcgcaggtcatcgctacttcctgcagctccggcaattaccacaccatcgacaccctgattcagtaacagactaaaccgctgtgccagctgctcaccgtctttaccgccgtgaagcaaaaaaaccatccgtccctgcgcttccagagcttccgtcaatccggccgtcaattcggcgtaaaacggcgcagataaatcacggacgatcaaaccaatgacgccgctttgcccgccgcgcagcgcgctcgcctggcgattgcgcacaaatcccagctcttcaatggcggcgttaacgcgttctcctgtggcggtagagattcgccctttgccactaagcaccaggctaacggtacttacgctcacgcccgcagccagcgcaacatcatgaatggttatttttttggcggtagccatgcagatgacctactccctgattatgtgacagataaaacgttttaccttttatttatcttatacccgctattatcgttgcgtaatgtgatttatgcctcactaaaatttgataaaacgttttatcttctcgcgcaatttactgaatccagattgttctctacgaggagtcgttttatgacggcgaaaacagcaccgaaagtcacgctgtgggagttcttccagcagttaggcaaaaccttcatgttacccgtggcattattgagcttctgcggcattatgctcggcattggtagttctcttagcagccatgatgtcataaccctgatcccggtcctgggcaaccccgtgttgcaggctatctttacctggatgagtaagattggcagctttgcttttagtttcctgcctgtcatgttctgtatcgccatcccgctgggcctggcacgcgaaaataaaggcgtagcggcattcgctggcttcatcggttatgcggtaatgaacctcgcggtaaacttctggttgaccaataaaggcattctgccaaccacggatgccgcggttctgaaagccaataacatccagagcattcttgggatccagagcatcgataccgggatcctcggtgcggtgatcgccggtattatcgtctggatgctgcatgagcgtttccataatatccgcctgccggatgcgctggcattcttcggcggtacgcgcttcgtaccaattatctccagcctggtgatgggccttgtcggcctggtgattccattagtctggccgattttcgccatgggtattagcggcttgggccatatgataaacagcgcgggtgatttcggaccgatgctgtttggtaccggtgaacgtctgctgttgccgtttggtctgcatcacattctggtggcattaattcgctttaccgacgcaggcggcacgcaggaagtctgcggtcaaaccgtcagcggcgcactgaccatcttccaggcgcaattgagttgcccgaccactcacggtttttctgaaagcgccacgcgtttccttagccaaggtaaaatgcctgcgtttctcggcggtctgccaggtgcagcgttagctatgtatcactgcgcgcgcccggaaaatcgccataaaattaaaggtctgctgatttctggcctgatcgcctgcgtcgttggcggcactaccgaaccgctggaattcctgttcctgttcgtagcgccagttctgtatgtcatccacgcgctgttaaccggcctcggcttcaccgtcatgtctgtgctcggcgtcaccatcggtaataccgacggcaatatcatcgacttcgtggtgttcggtattttgcatggtctgagtaccaagtggtacatggtgccagtggtggcggcaatctggtttgtcgtttactacgtcatcttccgtttcgctatcacccgcttcaatctgaaaaccccggggcgcgatagcgaagttgccagcagtatcgaaaaagccgttgccggtgcgccgggtaaaagtggttacaacgttcctgcaatcctcgaagcattaggcggtgccgacaatattgtcagcctcgataactgcattacccgtctgcgtttgtctgtgaaagatatgagccttgttaatgtgcaggcactgaaggacaatcgggcaattggcgtagtacaacttaatcaacataacctgcaggttgttatcgggccacaagttcagagtgtaaaagatgaaatggccggtctgatgcatactgtccaggcataaggataagatatgttcgattttagtaaggtcgtggatcgtcatggcacatggtgtacacagtgggattatgtcgctgaccgtttcggcactgctgacctgttaccgttcacgattagtgacatggattttgccactgccccctgcattatcgaggcgctgaatcagcgcctgatgcacggcgtatttggctacagccgctggaaaaacgatgagtttctcgcggctattgcccactggttttccacccagcattacaccgccatcgattctcagacggtggtgtatggcccttctgtcatctatatggttagtaaactgattcgtcagtggtctgaaacaggtgaaggcgtggtgatccacacacccgcctatgacgcattttacaaggccattgaaggtaaccagcgcacagtaatgcccgttgctttagagaagcaggctgatggttggttttgcgatatgggcaagttggaagccgtgttggcgaaaccagaatgtaaaattatgctcctgtgtagcccacagaatcctaccgggaaagtgtggacgtgcgatgagctggagatcatggctgacctgtgcgagcgtcatggtgtgcgggttatttccgatgaaatccatatggatatggtttggggcgagcagccgcatattccctggagtaatgtggctcgcggagactgggcgttgctaacgagcggcagcaaaagtttcaatattcccgccctgaccggtgcttacgggattatagaaaatagcagtagccgcgatgcctatttaagcgcactgaaaggccgtgatgggctttcttcccctagcgtactggcgttaactgcccatatcgccgcctatcagcaaggcgcgccgtggctggatgccttacgcatctatctgaaagataacctgacgtatatcgcagataaaatgaacgccgcgtttcctgaactcaactggcagatcccacaatccacttatctggcatggcttgatttacgtccgttgaatattgacgacaacgcgttgcaaaaagcacttatcgaacaagaaaaagtcgcgatcatgccggggtatacctacggtgaagaaggtcgtggttttgtccgtctcaatgccggctgcccacgtagcaaactggaaaaaggtgtggctggattaattaacgccatccgcgctgttcgttaaccccaattgcgcaacgtaaaaaatcgttgcgcaatcgtggatttttaccctgctttgtttttataatggtgcgcacttttatatccagaaaaagagtgcgaccatgattgataccaccctgccattaactgatatccatcgccaccttgatggcaacattcgtccccagaccattcttgaacttggccgccagtataatatcagccttcctgcacaatccctggaaacactgattccccacgttcaggtcattgccaacgaacccgatctggtgagctttctgaccaaacttgactggggcgttaaagttctcgcctctcttgatgcctgtcgccgcgtggcatttgaaaacattgaagatgcagcccgtcacggcctgcactatgtcgagctgcgttttagtccaggctacatggcaatggcacatcagctgcctgtagcgggtgttgtcgaagcggtgatcgatggcgtacgtgaaggttgccgcacctttggtgtgcaggcgaagcttatcggcattatgagccggaccttcggcgaagccgcctgtcagcaagagctggaggcctttttagcccaccgtgaccagattaccgcacttgatttagccggtgatgaacttggtttcccgggaagtctgttcctttctcacttcaaccgcgcgcgtgatgcgggctggcatattaccgtccatgcaggcgaagctgccgggccggaaagcatctggcaggcgattcgtgaactgggtgcggagcgtattggacatggcgtaaaagccattgaagatcgggcgctgatggattttctcgccgagcaacaaattggtattgaatcctgtctgacctccaatattcagaccagcaccgtagcagagctggctgcacatccgctgaaaacgttccttgagcatggcattcgtgccagcattaacactgacgatcccggcgtacagggagtggatatcattcacgaatataccgttgccgcgccagctgctgggttatcccgcgagcaaatccgccaggcacagattaatggtctggaaatggctttcctcagcgctgaggaaaaacgcgcactgcgagaaaaagtcgccgcgaagtaacaaaatggatggtgcaaatgcaccatccatttttcatgcaaggcacaaagtcgcgcgatgtttggcggattcgatgcccagctcaatcaactccattacctggattgcctggcttgccggaaccggattttcaccatcgccatttaacgcatcacgaatagccgcatagtaagccggataattcccaggcaccgtcaacagcgtttcttcgacacgttcctcaccttccacgcgggtaagtacgccatcacgcatatcgtagccccagtcttcctgcggtagacgctcgccatttttcagacgttcttcctgtggatcgaggccatatttcacataactgcctcgggatccatgcacgatataccgtgcactctcagcggctgccagcatggtaccgtgtaaaatgactcgccgctgtggataggacaagatggcgtggaaataatcggtgctctgcgctccgggccgtaactgtgccaaatctaccgtcatgctgaccggtaaaccaaaaagcgtaatggcctgatcaagaagatgtggtgctaaatcgtaccagataccgctgcctgggccgccctgttcacgccaacgatcgcgcacctgcggacggaagcggtcaaaatgagactcaaagtaagcaacttcacccagcacgccttccgcgagtaaaccttttagcgtcaagaaatcgctatcccagcgacggttatggaatacagacagcacacgccccaggctttttgccagcgcatccagctctcgcgcttgactcagtgtcacggtaaagggtttatcaacgaccacatgtttacccgcctcaagcgccgctttggctaacgggaaatgggtatcgttgggtgtaggaatgacaatcaggtctatgttgggatcgttaaacagatgcttcggctcagagacaaccgtaaccgttggccagtcggcttttacttttgtttcatcactgctggagattaccgccagttcctgcccgggcgtgcccgcaatcaggggcgcatggaaggttttgctcgcataaccatacccaatcaacccaacacggatgttgtcgctcatgtcattgcctctcattgaagtatgatggctatttgacactatcctttacccacgctcaacagtttaataacctgccagcaataagggatgttgtttaacttaagtcaaaaaaatagcgaattttccaacgacaaaagctaaatatcgcaaaaacctcagtaaaaatcttgctggagctattattgctaagtaacatttaccccctgaagttaatggatcaatcaagagagatgtgggctgtaatgaatcgtcttattgaattaacaggttggatcgttcttgtcgttagtgtcattcttcttggcgtggcgagtcacattgacaactatcagccacctgaacagagtgctagcgtacaacacaagtaagctctgcacttgtggagcgacatgctgcccgtccgggtgcatgttttcacttgtcggatattaaaccaggaatttattatcttgttcgatgttgttggtgattgtcagggatagtaaagcgcgttactcttttcagagcagtttttcatccctgaatatttgccatcagcgcattcttattattgtaataacacaagcgttcacttttggtgaaattttatcatcactaataatacctacccctttggtattaattattttatggaccttttatgactgttcaggactacttattaaaatttcgcaaaatcagtagtctcgaaagtctggaaaaactctacgaccatcttaattacaccctgacggacgatcaggaactgatcaatatgtatcgtgctgccgatcaccgtcgcgcagagctggtttctggcgggcgtttgtttgacctcggccaggtaccgaagtccgtctggcactatgtccaataaagaaagtagcgatcggttataaaagccttataataacgcccctaaaattagatttgcctgtttgcgtcgctattctggagaacctatgaccaccacaacgccacaacgtattggaggctggttgcttggcccgttggcctggcttttagtcgctctgttgagtacgacgctggcgttgttgctgtataccgctgcgttatcttctccgcaaacatttcaaacgctcggcggacaagcactgacgacacaaatcttatggggcgtttcttttattaccgctatcgccttgtggtattacacactgtggttgaccatcgctttctttaaacgtcggcgttgtgttcctaaacactatattatctggctgcttatttccgtattgctggcagtaaaagcattcgcttttagtcccgtggaagatggcatagccgttcgccagttgctgtttactttgttggcaaccgcattgatcgtcccctatttcaaacgcagcagccgggtaaaagcgacgtttgtgaatccgtaataaccttacagttaacctgttgtcgcctgctctggattaacggataataggcggcttttttatttcaggccgaaaaatgactgactacctgttactgtttgtcggaactgtactggtcaataactttgtactggtcaagtttctcggtctctgtccgtttatgggggtttccaaaaaactggaaaccgcgatgggcatggggctggcaacaacgtttgtgatgacgctggcgtctatttgcgcctggcttatcgatacgtggattttgatcccacttaatctgatttacctgcgcaccctggcatttattctggtgattgctgtggtcgtgcagttcaccgagatggtggtgcgcaaaaccagcccggtgctttaccgtctgctggggatttttttgccgcttatcaccaccaactgtgcagtgctcggcgtggcgttgctgaatatcaatctcgggcacaatttcttgcagagcgcgctgtacggtttttccgccgctgtcggtttcagcctggtgatggtgctcttcgccgccatccgcgaacgccttgctgtggctgatgtcccggcaccttttcgcggtaatgccattgcgttaattaccgcaggtcttatgtctctggcctttatgggctttagtggtttggtgaagttgtaatgaatgctatctggattgccgttgccgccgtgagcctgctgggcctggcgtttggcgccattctgggttatgcctcccgccgttttgcggtggaagacgatccggtcgttgagaaaattgacgaaatcttaccgcagagccagtgtggtcagtgcggttatcccggctgtcgcccctacgcggaagccatcagctgtaacggtgaaaaaatcaaccgttgcgccccaggtggcgaagctgtgatgctaaaaattgccgagttgcttaatgtcgagccgcagccgctggatggcgaagcgcaagagataacgcctgcgcggatggtggcggttattgatgaaaataactgtattggctgcactaaatgtattcaggcgtgtccggtagacgccatcgttggcgctacccgtgccatgcatacggtaatgagtgatctctgtacgggctgcaatttatgtgttgatccgtgcccgacgcactgcatcagcttgcaaccggtcgcagaaacacctgactcctggaaatgggatctgaacaccattcccgtgcgtatcattcccgtggaacaccatgcttaagttattctctgcattcagaaaaaataaaatctgggatttcaacggcggcatccatccaccggagatgaaaacccagtccaacggtacacccctgcgccaggtacccctggcgcagcgttttgttattccactgaaacagcatattggcgctgaaggtgagttgtgcgttagcgtcggcgataaagtattgcgcggccagccgcttacccgtggtcgcggcaaaatgctgcctgttcacgcgcccaccagcggtaccgttacggctattgcgccccactctacggctcatcctagtgctttagctgaattaagcgtgattattgatgccgatggtgaagactgctggatcccgcgcgacggctgggccgattatcgcactcgcagtcgcgaagagttaatcgagcgcatacatcagtttggtgttgccgggctgggcggtgcaggattcccgacaggcgttaaattgcagggtggcggagataagattgaaacgttgattatcaacgcggctgagtgcgagccgtacattaccgccgatgaccgtttgatgcaggattgcgcggctcaggtcgtagagggtattcgcattcttgcgcatattctgcagccacgcgaaattcttatcggcattgaagataacaaaccgcaggcgatttccatgctgcgcgcggtgctggcggactctaacgatatttctctgcgggtgattccaaccaaatatccttctggcggtgctaaacaattaacctacattctgaccgggaagcaggttccacatggcgggcgtagttccgatatcggcgtattaatgcaaaacgtcggcactgcttatgcagtgaaacgtgccgttattgatggcgagccgattaccgagcgtgttgtaaccctgactggcgaagcaatcgctcgcccgggcaacgtctgggcacggctggggacgccagtgcgtcatttattgaatgatgccggattctgcccctctgccgatcaaatggtgattatgggtggcccgctaatgggctttaccttgccatggctggatgtcccggtcgtaaagattaccaactgtctgttggctccctctgccaatgaacttggcgaaccacaggaagaacaaagctgcatccggtgtagcgcctgtgctgacgcctgccctgcggatcttttgccgcaacagttgtactggttcagcaaaggtcagcaacacgataaagctaccacgcataacattgctgattgcattgaatgtggggcttgcgcgtgggtttgcccgagcaatattcccctggtgcaatatttccgtcaggaaaaagctgaaattgcggctattcgtcaggaagaaaagcgcgccgcagaagccaaagcgcgtttcgaagcgcgccaggctcgtctggagcgcgaaaaagcggctcgccttgaacgacataagagcgcagccgttcaacctgcagccaaagataaagatgcgattgctgccgctctggcgcgggtgaaagagaaacaggcccaggctacacagcctattgtgattaaagcgggcgaacgcccggataacagtgcaattattgcagcacgggaagcccgtaaagcgcaagccagagcgaaacaggcagaactgcagcaaactaacgacgcagcaaccgttgctgatccacgtaaaactgccgttgaagcagctatcgcccgcgccaaagcgcgcaagctggaacagcaacaggctaatgcggaaccagaacaacaggtcgatccgcgcaaagccgccgtcgaagccgctattgcccgtgccaaagcgcgcaagctggaacagcaacaggctaatgcggaaccagaagaacaggtcgatccgcgcaaagccgccgtcgaagccgctattgcccgtgccaaagcacgcaagctggaacagcaacaggctaatgccgagccagaacaacaggtcgatccgcgcaaagccgccgtcgaagccgctattgcccgagccaaagcgcgcaaacgggaacagcaaccggctaatgcggagccagaagaacaggttgatccgcgcaaagctgccgtcgaagcggctattgcacgcgccaaagcacgcaagctggaacagcaacaggctaatgcggtaccagaagaacaggttgatccgcgcaaagcggcagttgccgcggctattgcccgcgctcaggccaaaaaagccgcccagcagaaggttgtaaacgaggactaaatggtattcagaatagctagctccccttatacccataaccagcgccagacaagccgcattatgctgttggtgttgctcgcagccgtgccaggaatcgcagcgcaactgtggttttttggttggggtactctcgttcagatcctgttggcaagcgttagtgctctgttagccgaagctctcgtactcaaactacgcaagcagagcgtagccgcagcgttgaaagataacagtgcattgctgacaggcttattgctggcggtaagtattccccccctcgcgccatggtggatggtcgtgctgggtacggtgtttgcggtgatcatcgctaaacagttgtatggcggtctgggacaaaacccgtttaatccggcaatgattggttatgtggtcttactgatctccttccccgtgcagatgaccagctggttaccgccacatgaaattgcggtcaacatccctggttttatcgacgccatccaggttatttttagcggtcataccgccagtggtggtgatatgaacacactacgcttaggtattgatggcattagtcaggcgacaccgctggatacatttaaaacctctgtccgtgccggtcatagcgttgaacagattatgcaatatccgatctacagcggtattctggcgggcgctggttggcaatgggtaaatctcgcctggctggctggcggcgtatggttgctatggcagaaagcgattcgctggcatattcccctcagcttcttagtaacgctggcgttatgcgcaatgttgggctggttgttcagtccagaaacactggcagcaccgcaaattcatctgctgtctggagcgaccatgctcggcgcattctttattttgactgacccggttaccgcttctacgaccaatcgtggtcgtcttattttcggcgcgcttgcgggcttattagtctggttgatccgcagtttcggcggctatcctgacggcgtggcttttgccgtcctgctggcgaacatcacggttcctctgatcgattactacacgcgtccgcgcgtctacggccatcgcaaagggtaaaccatgctgaaaactatccgaaaacacggcattacgttggcgctatttgcagcgggtagtacagggttaactgcggccatcaaccagatgaccaaaacgacgattgctgaacaggccagtctgcaacaaaaggcgttatttgatcaggtgctgccagccgaacgctataacaatgcgctggcacagagttgctatctggtaactgcgccagagttaggtaaaggtgagcatcgggtttacatcgccaaacaggatgacaaaccggtagccgccgttctggaagcaaccgcgccagatggctattccggtgcgattcagctgctggtgggagccgattttaacggcacggtacttggcacgcgcgtgacagagcaccacgaaacgccagggcttggcgataaaatcgaactgcgcctttctgactggatcacccattttgcgggtaaaaaaatcagtggtgcagatgatgcgcactgggcggtgaagaaagatggtggtgatttcgaccagttcaccggcgcgacgattactccccgcgcggtggttaatgcggtaaaacgcgccggattgtacgctcagacgttaccggcacaactttctcaacttcctgcctgtggagaataaagcgtgagcgaaattaaagacgttattgttcaggggttgtggaaaaacaactctgcgctggtccagttgctcggcctttgtcctctgttggcggtcacgtccactgccactaacgctctgggtttaggacttgcgactacgctggtactgacgctgaccaacctgaccattagcacgctgcgtcactggacgccagccgagatccgcattcccatttacgtgatgatcatcgccagcgtggtcagcgctgtacagatgctgatcaacgcctacgcctttggcctgtatcaaagtttagggatttttattccgctgattgtcactaactgtatcgttgtgggccgcgctgaagccttcgccgccaaaaaaggtccggcgcttagcgcactggacggctttagtattggtatgggcgcaacctgcgccatgttcgtgctgggtagtctacgcgaaattatcggcaatggcacattgtttgacggtgcagatgcgctgttaggtagctgggcaaaagtattacgcgtggagattttccacaccgactcccctttcctgctggcgatgctgccaccaggtgcatttattggcctgggactgatgctggcaggaaaatacctgattgatgaaagaatgaaaaagcgccgtgctgaagcagctgcagaacgtgcattgccaaacggtgaaacagggaatgtctgatgaataaagcaaaacgcctggagatcctcactcgcctgcgtgagaacaatcctcatcccaccaccgagcttaatttcagtagcccttttgaattgctgattgccgtactgctttccgctcaggcgaccgatgtcagtgttaataaggcgacggcgaaactctacccggtggcgaatacgcctgcagcgatgcttgaactgggcgttgaaggggtgaaaacctatatcaaaacgattgggctttataacagcaaagcagaaaatatcatcaaaacctgccgtatcttgctggagcagcataatggcgaggttccggaagatcgtgctgcgcttgaagccctgcccggcgtaggtcgtaaaacagccaacgtcgtattaaacactgcattcggctggccgactattgctgtcgacacgcacattttccgcgtttgtaatcgtactcaatttgcgccggggaaaaacgtcgaacaggtagaagaaaagctactgaaagtggttccagcagagtttaaagtcgactgccaccattggttgatcctgcacgggcgttatacctgcattgcccgcaagccccgctgtggctcttgtattattgaagatctttgtgaatacaaagagaaagttgacatctgaagaaaaggggtaacaccgattaccccattgataacctttctttatcctcttttaaaacatctttttaacgtcaatgatgccattgcttagcgttatcatcaggtaatccgtttgcggataaccaaaaatgcaggttaattgtttttttaatagcgaaattttctattcattcgtgatcaagatcacgatgctgtcgcaatgtaaaaacattgcaagaatcaggttaaaatcatttaaatttacacacgcaacaaatattgacctacaaaacattacactggctatttttcagaaactggactatctcactagtaaaaacgctaaatagcagaacatatcgccgttaagccatcacccccctctcagtgcagtgaaaaaatctgccgttacgttttttgaaaaatttaacgctggataacatttcccggaatggttgaattccccgcctcagttatatgtaacagattattacaaaggacttgtctgaaagtgcaagatagtgaacattacctgccgtttcccctcccactataacaattgcgcgtatgttttttatacataacgcgagaaagcacccccgttaatatgggatgtaaaaaaagaggtaaaagtgtccactgcaaaccaaaaaccaactgaaagcgtcagtttgaacgctttcaaacaaccgaaggcgttctatctcatcttcagcattgagttatgggaacgttttggttattacggcctacaaggaattatggctgtttacctggttaaacaactgggtatgtctgaagcggatagtatcacccttttctcttcctttagtgccctggtttatggtctggtcgctatcggcggctggttaggtgacaaggtactgggtactaaacgcgtaattatgctcggcgctattgtgctggcgattggttatgctctggttgcctggtctggtcacgacgccggtatcgtttatatgggtatggcggctattgcggtcggtaacggcctgtttaaagctaacccgtcttctctgctttctacatgctatgagaaaaacgacccgcgtctggacggtgcattcaccatgtactacatgtccgtcaacatcggctctttcttctctatgattgctacgccgtggctggccgcgaaatacggctggagtgttgcgtttgcgttgagcgttgtaggcctgctgatcactatcgttaacttcgccttctgccaacgctgggttaaacagtacggtagtaaaccagacttcgagcctatcaactaccgtaacctgctgctgaccattattggtgttgtggcactgatcgctatcgccacctggctgctgcacaatcaggaagttgcgcgtatggcgctgggcgttgttgccttcggtatcgtggttatcttcggtaaagaagccttcgcgatgaaaggtgctgcgcgtcgtaaaatgatcgttgccttcatcctgatgctcgaagccattatcttcttcgtgctgtacagccagatgccaacgagtctgaacttctttgcgattcgtaacgttgagcactccattctgggtctggccgtagaacctgagcagtatcaggcactgaacccgttctggatcatcatcggtagtccgattctggccgctatctataacaagatgggcgataccctgccgatgccaaccaagtttgcaatcggcatggtgatgtgttctggtgcgttcctgattctgccgctgggtgcgaaattcgcgtctgacgctggtatcgtgtctgtaagctggctggtcgcaagctatggcctgcagagcatcggggaactgatgatctctggtctgggtctggcaatggttgctcaactcgttccgcagcgtctgatgggcttcattatgggtagctggttcctgaccactgccggtgcaaacctgattggtggttatgttgcgggtatgatggctgtgccggataacgttaccgatccgctgatgagtctggaagtctatggtcgcgtattcttgcagattggtgtcgctactgccgttattgcagtactgatgctgctgaccgcgccgaaactgcaccgcatgacgcaggatgacgctgcagacaaagcggcgaaagcagccgtagcgtaaaattcagggaaactcttttacaagccgctaacttttcgttagcggctttttttttgttcagcaacgcactaccatactttaaaccacagacaaaaggagttaccgatgaaattgttctacaaaccgggtgcctgctctctcgcttcccatatcaccctgcgtgagagcggaaaggattttaccctcgtcagtgtggatttaatgaaaaaacgtctcgaaaacggtgacgattactttgccgttaaccctaaggggcaggtgcctgcattgctgctggatgacggtactttgctgacggaaggcgtagcgattatgcagtatcttgccgacagcgtccccgaccgccagttgctggcaccggtaaacagtatttcccgctataaaaccatcgaatggctgaattacatcgccaccgagctgcataaaggtttcacacctctgtttcgccctgatacaccggaagagtacaaaccgacagttcgcgcgcagctggagaagaagctgcaatatgtgaacgaggcactgaaggatgagcactggatctgcgggcaaagatttacaattgctgatgcctatctgtttacggttctgcgctgggcatacgcggtgaaactgaatctggaagggttagagcacattgcagcatttatgcaacgtatggctgaacgtccggaagtacaagacgcgctgagtgcggaaggcttaaagtaatagccatcggcccacaggtcgttgtgggccgaaatgagatatttcagagctttgttgcgctgaagtaatgttctggtttggcaatacgatcctgagcagccaccacttgcagctcatattcctgcattgctttggtggtcaccatgatttcgtagactgcagcggtcacatgttccagcgcctcctgcagcgttgccccctgaagcagtttcaccagcagtaaaccgctcgtcacatcaccaacacctaccggctggcgcataccaaaatccaccagcggacggctgatatgccaggcttcatcggcggtgaccagcagcatttcaaaacggtcacggctgtagccagctcgcgccaggtgtttaaccaacacaatttgtggcccttgcgcaatgagttcgcgcgctgccagaaccgcttcttcgacgttatttaccgcatgctcacagagtatttccagctcaaccagatttggcgcaatgatatcgctggcaggcaaaccgtgccgcacatgaaactctgcgacacccggtgcaacgatacagcctttttccggatgacccattaccggatcgcaaaaatatttcgcctgcggattcgcggctttcacctgacggacgataccgaggatatgttcaccctgctccgcgcttcccagatagccacttaatacggcatcacaggtgtgtaatttatcaatggcggcaatgccttgcacaatttcggttaaatggctgggcggcatcacgcagccagtccatttgccgtattgggtgtgattagaaaattgaacggtgttcagcggccagacgttcgcgcccaggcggcgcatcggaaactctgccgcactgttacccgcatgaccataaacaacgtgagactggatagcgagaatatttttcatcatgttccctgtataaaaaccagggggagtgatttctcactccccctttccacttaatgcattatttccagcaaatcagacagtaattctttttaccgcgacgcagtaaggtaaaacgaccaaacagacgatcttcttctttaaagaagtattcaggatcggactgtttttcaccgttaatggtgatggcattggaggcgatagttttacgtgcctgaccacgggaaggttgcagttcagaatcgaccagtgcctgcatcaggtctgcgcccttttccatctcaaccatcggtacgccgtcctgcgccagctgttcgaagtccgcttcactcagcgcactcaaagaaccgctgaacaggcattcggtaatacgttttgccgcctgtaaaccttcttcaccgtgaaccagacgagtcacctgctccgccagtacatactgggcgcgcggtgctttaccgctgtttttatcttcttcttccagggcgttgatctcttcaatgctcataaaggtgaagaacttcaggaagcggtaaacgtcggcatccgcagtgttgatccagaactggtagaatttgtacgggctggttttcttcggatccaaccagactgcgccgccttcagttttaccaaatttggtgccatctgctttagtgatcagcggaacggtcaggccaaacacctgattctgatgcagacgacgggtcaggtcgataccagaagtgatgttaccccactggtcagaaccaccaatttgcagcaccacaccgtactgtttgttcagacaggcgaagtcataaccctgcaacaggttgtaggaaaactcagtgaagctaatcccctgatcttcacggttgagacgctgcttaaccgcttctttgttgatcatctggttaacggagaagtgtttgccaatatcgcgcaggaaggtcagcacattcatattgccgaaccagtcatagttgttcgccgcgatagcagagttttctccacagtcgaaatcgaggaacggggcaacctgcttacggattttgtccacccactcctgaacagtttcttcggtgttcagcttacgctcggcagctttgaagctcgggtcgccaatcagacccgtcgcgccgcctaccagcgcaaccggcttgtggcccgcctgctggaagcgtttcaggcataacaatggaacaagatgccccaaatgcaagctgtcagcggtaggatcgaagccgcaatagagcgcgatcgggccttgcgccagtcgctctgctaacgcttcctcgtccgtcacctgggctaccagcccccgctcttgcaattgtttaatcaagttactgcttgccatcaaaatctccatgtatataacgactgcacctttgccggtacacgacttttcgccagatgcgaaagagacatagaataaagtgccagaatcaggagtaccagcgattaaagcaagatttttgcatcttttcagggtgcaagacgatcaatcttccacgcatcattttcacgctggtacaaaaagcggtcatgcaggcgatgctcaccaccctgccagaactcaatctgttcaaggctgacgcgaaaaccgccccaaaagctcggcaatggcacttcgccctgttgaaacttctgcttcagctccaggaatttactttcaaggataccgcgggcagaaatgcgactggactgcttgctaacccatgcaccaatctggctatcacgcgggcggctatgaaaatatttcatcacttcgagagtgctaagtcgttctgctttaccgatcaccatcacctggcgctcaagggtatgccacgggaacagcaggctaacgcgcggattattttcgatttgatgtgctttacggctgccgaggttggtgtaaaacaccatgcctttttcgtcgtaatgtttgagtaaaacgatgcgctgataaggctgaccatgttcatccacggtagcgaccaccatcgcggtagggtccgccagtttggcttcacaagcctgagagagccaacgttcaaaaagggttaatggatcggcgggaagatcgcggcggcgtaacccgcctttggtgtattcacggcgcagatgcgcgatttgctgcaattcgtcgttatcagacatggttttctttacggattgtcagtgggtgacgctattgtgcgccgcccctggaaaaatctcaacgctgtggattttgtaactgacagttattcaagacgatgcggtcgcgtttatagacagtcgcttcatcgcctttgctccagaaaacatagattccgtcagtgtaacgcgcgccagaggcactaatgccctgtttgagatgcagtagttgattatcgtaaacaaaactgacctcctggcgcggattattcagtttgaccgtcaacggtttttcatcacactggtattccagcgtatcggtttgcatgcgctcaaccagctgattaaaggcgctacagccggagagaaggaccggcaaaatgataattaacagttttttcatagtcatatcccgaagactttcctggtctggagggcaatacgccctccctaacgttccaagtgtaacggcagacgcggtaagaaaaattcagttaactctgatatcacgggttagcggggaaaatagcccccagtaccgtctcctggcttgcgccagtgacggaaggcagatttcctggtaatcccgccagcgtccgccaggcaagccaggcgaaagccaatgcttccatgtcatcgccactaatgccaacggcatcggtggtggtgacttctgtgcctggcagtaatgccgccagacgcgccatgagtagcggattacgactacctccaccacataccatcaatcgttcgcagccaccgctcaacaaaacttgttcagaaatggtcacggcggtgagttctgccagtgtcgcctgcacatctcggggatcaacacccggaaaatggcgcaaatggcgctccagccaaccatagttaaagtattcgcgtccggtgcttttcggtgcaggttggctgaaatacgggtcgctgagcatattttgcagcagtgggagaataactttacccgcccgtgcccactcggcatctttatcgtaaggtttaccggcctgacgccagatccaggcatccatcagcatgttaccaggaccggtatcgtagcccccaaccggctgcccaggaatgagcagactcagattggcgatgccgccaatattgagcaccattcgtcgctcggttgggtgagccagcagcgcatgatggaacgcaggtaccagcggtgcgccttgtcctcccaaggcaatatcgcgacggcgaaaatcaccgacaaccgtaattccggtgcgtgccacaatttgattgttatcgccaatctgtaaagtgtgtggtgccacgcccgtcggttcatgccagacggtttgaccgtgacaaccgatcgcaactatatctcttgcctgcagattttgttccttaagcaaggcattgaccgcatcagcaaaaagttgcccgagttgagtatcaagctgtccaaactggctaagtgtaagctgctggccctggcaaatatccagtacagcctgtttcagagataccgggatcggccaactcaaacttgccagctgtgcgacccggtgttcatcaattgtcgccaacacaacatcaacaccatcaaggctggtgccactcataacgccaataaagcggccgcttttcatagttcatcctttttcaatctgacgtttgcgcaccactcaaacataaacttttcgtgaataccatgcggaatgaccgatttttaccgttggtagtaaaacattatcttcaaatcaataatcatcatgaatgttttgtttataattggttgatcctactttcattatgatttgctcatatttggtagaacatgtaaccatggattcacatatgccatatactttgaccatgagggatgcttgcgtggcgtttcatggtgaacaggagatttttcaatgattaaacgcgtattggttgttagtatggtaggtctgtctcttgtcggttgtgttaataacgacaccctgagtggggatgtttataccgcttctgaagcgaaacaagtacagaatgtcagctatggcaccatcgttaacgtacgtccggtacagattcagggcggtgatgattccaacgttatcggtgcaattggcggtgctgttcttggtggtttcctggggaatactgttggtggcggaaccgggcgttctctggctactgcagcaggcgctgttgcaggtggcgtagctggtcagggcgtacagagtgcaatgaacaaaacgcagggtgtcgagctggaaattcgtaaagacgatggtaataccatcatggtggtacagaaacaaggcaacactcgtttctctccgggccaacgtgtcgtactggccagcaatggcagtcaggtgaccgtttctccgcgctaaataagtttgcgtgtggtcaggttactgaccacacgcccccttcatttcaccctttggcctgtaactcaatgatattatgctcaagttttgcgatgagcgtaatcagttgctccagttcctctgcggagatgccatgtaatatttccgcgcgggttttgttaataacagcttccatttcgctgatcagcggctctgccttttccgtcagtttaatacgtttagcccgacgatcgctggcacaagtttgacggctaattaaccctttttcttccagttggtccagagtacggaccagacttggctgctcgatgccaatcgcttttgccagttgaatttggctctggtctggaggtaactgatggatattgtgtaacgtaacccaatgggtttgtgttaactccagcggtttcaggcgatggtctatcagagcacgccatatgcgcaccaaccgtgccagatcagaacctagtgggctttccaatttcatctccttataattagcttgctaagatattatgcggcttttagaatagtgtgcagcaattgtattgctaaaacaaatgtattgctgcatttggttaccgtcagacatatttttcagaaattgcgcgtaaatttttcgcacttaaagaatatttattaatctaacgcaatatattcggtcgtaaaggaatctactttgtgaagtttatgctcaatgcaacaggattgcccttacaagatctggtgttcggtgcgtccgtctactttcctccgtttttcaaagcattcgcgtttggattcgtcatctggcttgtcgtacaccgcctgcttcgtggctggatctacgccggtgacatctggcatcccttgttaatggatttaagcctgtttgcgatttgcgtttgccttgctctggcaatactgattgcgtggtaactatgagtattaaaacaattaagtatttcagtacaatcattgtagcggtagttgcggttcttgccggatggtggctgtggaattattacatgcaatctccgtggacacgcgacgggaaaatacgcgcagaacaggtttctatcaccccacaggtgagcggacgtattgttgagctgaatataaaagacaaccagctggttaacgcgggggatcttctgctcacgatcgataaaacgccctttcagatcgccgagctgaacgcacaggctcagctggcgaaagcgcaatctgacctcgcaaaagccaataacgaagcgaatcgtcgtcgtcatctcagtcaaaattttatttctgccgaagaactcgataccgctaacctcaatgttaaagcgatgcaggccagtgttgatgccgcacaggcgacgctgaaacaggcacaatggcaactggcgcaaacggaaattcgcgccccggtgagtggatgggtgactaaccttactacccgcatcggcgattacgctgataccgggaaaccgctgtttgcccttgtcgacagccacagcttttacgtcattggttattttgaagaaaccaagttgcgccatatccgcgaaggtgcaccagcacaaattaccctctatagtgataacaaaacgttacagggtcacgtttccagtatcggtcgggcgatttatgatcagagcgttgaaagtgacagtagccttattccggatgttaaacctaacgtcccctgggttcgactcgcccaacgcgttcccgtccgctttgcgctggataaagtcccaggcgatgtcacgttggtgagcggcaccacctgtagcattgccgtaggtcaataatgaacgcaagcagttggtccttgcgcaatttgccctggttcagggccacgctggcgcaatggcgttatgcgttacgcaataccattgccatgtgtctggcgctgacggttgcctattatttaaatctggatgaaccctattgggcgatgaccagcgctgcagtggttagctttcccaccgttggcggtgttatcagcaaaagcctcggacgcatcgctggcagtttgctcggagccattgcggcactgcttcttgccgggcatacgctcaatgagccgtggttttttctattgagcatgagcgcgtggcttggcttttgtacctgggcctgtgcgcacttcacgaataacgtcgcgtatgcatttcaactggcgggctacacggctgccatcatcgcctttccgatggttaatattactgaggccagccagctgtgggatatcgctcaggcgcgcgtttgcgaggtaatagtcggtattttgtgcggcggcatgatgatgatgatcctgccgagcagttccgatgctactgcccttttaaccgcattgaaaaacatgcacgcccgattactggaacatgccagtttactctggcagcctgaaacaaccgatgccattcgtgcagcacatgaaggggtgattgggcagatactgaccatgaatttgctgcgtatccaggctttctggagccactatcgttttcgccagcaaaacgcgcgccttaatgcgctgctccaccagcaattacgtatgaccagtgtcatctccagcctgcgacgtatgttgctcaactggcccagtccgccaggtgccacacgagaaattctcgaacagttgctgacggcgctcgccagtagccaaacagatgtttacaccgtcgcacgtattatcgccccgctacgcccgaccaacgtcgccgactatcggcacgtcgccttctggcagcgactacgttatttttgccgcctttatctgcaaagtagtcaggaattacatcgtctgcaaagcggtgtagatgatcataccagactcccacggacatccggcctggctcgtcataccgataacgccgaagctatgtggagcgggctgcgtacattttgtacgttgatgatgattggcgcatggagtattgctagccaatgggatgccggtgccaatgcattaacgctggcagcaattagctgcgtactctactccgccgtcgcagcaccgtttaagagcttgagtcttctgatgcgcacgctggtgttacttagcctattcagctttgtggtcaaatttggtctgatggtccagattagcgatctgtggcaatttttactgtttctctttccactgctggcgacaatgcagcttcttaaattgcagatgccaaaatttgccgcattgtgggggcaactgattgtttttatgggttcttttatcgctgtcactaatcccccggtgtatgattttgctgattttcttaacgataatctggcaaaaatcgttggcgtcgcgttggcgtggttagcgttcgccattctgcgtccaggaagcgatgctcgtaaaagccgccgccatattcgcgcgctgcgccgggattttgtcgatcagctaagccgccatccaacactgagtgaaagcgaatttgaaagcctcacttatcatcacgtcagtcagttgagtaacagccaggatgcgctggctcgccgttggttattacgctggggtgtagtgctgctgaactgttctcatgttgtctggcaattgcgcgactgggaaagccgttccgatccgttaagccgagtacgggataactgtattagtctgttgcggggagtgatgagtgagcgtggcgttcagcaaaaaagtctggcggccacacttgaagaattacagcggatttgcgacagccttgcccgtcatcatcaacctgccgcccgtgagctggcggcaattgtctggcggctgtactgcagccttagccaacttgagcaagcaccaccgcaaggtacgctggcctcttaattacttaattacaccacaggcatagcgttcaccgccaccgcccagcggtttaggttgatcggacatattatcgccgccaacgtggaccatcagcgctttgtctttgatttcatccagacttttcagacgaggcgcgatgacggcatcggtagctttgccgtcattattgacgaccagtgcaggcagatcgcctaaatgcccggcaccttctggcccttcatgtttaccggtattttgtggatcaagatgcccgcctgcggattccgcggcgctggctttgccatctttggtggctggctggcagcttcctttggcatgaatatggaagccatgttcaccggggggtaatgctttcagatcggggctaaactccagacctttatcggtttcagtaatggtgacgctaccaatactctgccctaccccttggctcgtgacgaggttcatctcgactttttcactggcagcttgtgcgccggttgcaacaaccagcgccagaatagccagactaaaacgtttcataggacctccgttcattgtgcattcctgaataagtgtaaaccagtgacacatttttgaacggcggctattcctaaaagtgcttacggtacgtcgtaccccagtgccgctttacggatacgaaaccattgttgacgggtcattttcagtgtttctgcttcgacagctgcccgtacgcgctcaattttaccactaccgataattggcagcggctggcttggtaaacgtaatacccaggcgtaaaccacctgttcaatgctgcccgcgtttaactcctctgccaccacagccagttcatcacgcagcggctggaaataatcatcattaaacagacgaccaccaccaaggcaggaccacgccatcggacgaacacgcagttgttgtagttggtcgagcgtgccatccagcagtaacggctgatgcaccggggatatttccacctgattagtggcaagggtaaacggcagacgactttgcaacagggcaaattgcgcaggcgtaaagttgcttacgccaaaatgacgcactttgccgctctgatgcagatgtttgaacgcgtccgccacttcatcggcatccattaacgggtctggtcggtggattaacagcaaatccagatgatcggtcgcgagattaattaggctctgttcggcgctcttaatgatgtgatcgcggtcagtgatgtaatgaccaatgacgttttcttcacgcgcggtcgtcgcgataccgcatttactgacgatttccatccgttcacgcaggtgaggtgccagtttcagtgcctcgccaaacgccgcttcgcactgatagccaccataaatatcagcatggtccacggtggtcacgccgagatccagatgctcttcaataaaactgaccagctggcgggcggacatattccagtccatcaatcgccagtagcccatcacaaaacgggaaaactccgggccttgcggcgcaatagtaatacgctgaaccataatcgcttcctcttatcagatatgagaggagtatacgcaagattaggttcaaaagagacttggttgctccggttcgtcactactcgctggcttatttgcgcgtaatttgcgcattaatcgctgccgacaaaggcgcagcacctcttgtttttcgccatcgctcattttattccagttaaaacgctcatcacgactacgaaaacagccgcgacaaaacccgcgttcgtcagactggcaaattccccggcacgggctctggacgggaaagaactctaattgctccgccacttcgccctcctcagataagattattaccattattgaagctgttaatgtccaaagtagcaactttgcttgcactagaccgactggtctactacactccaacgcatgaacaaacacaccgaacatgatactcgcgaacatctcctggcgacgggcgagcaactttgcctgcaacgtggattcaccgggatggggctaagcgaattactaaaaaccgctgaagtgccgaaagggtccttctatcactactttcgctctaaagaagcgtttggcgttgccatgcttgagcgtcattacgccgcatatcaccagcgactgactgagttgctgcaatccggcgaaggtaactaccgcgaccgcatactggcttattaccagcaaacactgaaccagttttgccaacatggaaccatcagtggttgcctgacagtaaaactctctgccgaagtgtgcgatctgagtgaagatatgcgcagcgcgatggataaaggtgctcgcggcgtgatcgccctgctctctcaggcgctggaaaatggccgtgagaaccattgtttaaccttttgtggcgaaccgctgcaacaggcacaagtgctttacgcactgtggcttggcgcgaatctgcaggccaaaattagccgcagtttcgagccactggaaaacgcgctggcccatgtaaaaaacattattgcgacgcctgccgtttaacaggcattttttatcaccagacgaccgggagcctttatgagttctgaaaaactgtattccccactgaaagtgggcgcgatcacggcggcaaaccgtatttttatggcaccgctgacgcgtctgcgcagtattgaaccgggtgacattcctaccccgttgatggcggaatactatcgccaacgtgccagtgccggtttgattattagtgaagccacgcaaatttctgcccaggcaaaaggatatgcaggtgcgcctggcatccatagtccggagcaaattgccgcatggaaaaaaatcaccgctggcgttcatgctgaaaatggtcatatggccgtgcagctgtggcacaccggacgcatttctcacgccagcctgcaacctggcggtcaggcaccggtagcgcctagtgcacttagcgcgggaacacgtacttctctgcgcgatgaaaatggtcaggcgatccgtgttgaaacatccatgccgcgtgcgcttgaactggaagagattccaggtatcgtcaatgatttccgtcaggccattgctaacgcgcgtgaagccggttttgatctggtagagctccactctgctcacggttatttgctgcatcagttcctttctccttctagtaaccatcgtaccgatcagtacggcggcagcgtggaaaatcgcgcacgtttggtactggaagtggtcgatgccgggattgaagaatggggtgccgatcgcattggcattcgcgttagtccaatcggtactttccagaacacagataacggcccgaatgaagaagccgatgcactgtatctgattgaacaactgggtaaacgcggcattgcttatctgcatatgagtgaaccagattgggcggggggtgaaccgtatactgatgcgttccgcgaaaaagtacgcgcccgtttccacggtccgattatcggcgcaggtgcatacacagtagaaaaagctgaaacgctgatcggcaaagggttaattgatgcggtggcatttggtcgtgactggattgcgaacccggatctggtcgcccgcttgcagcgcaaagctgagcttaacccacagcgtgccgaaagtttctacggtggcggcgcggaaggctataccgattacccgacgttgtaatccaacattgcgagcggcgtaaagccgccgctatactaaaacaacattttgaatctgttagccattttgaggataaaaagatgcgtcttcttcataccatgctgcgcgttggcgatttgcaacgctccatcgatttttataccaaagtgctgggcatgaaactgctgcgtaccagcgaaaacccggaatacaaatacagtctggcgtttgttggctacggcccggaaaccgaagaagcggtgattgaactgacctacaactggggcgtggataaatacgaactcggcactgcttatggtcacatcgcgcttagcgtagataacgccgctgaagcgtgcgaaaaaatccgtcaaaacgggggtaacgtgacccgtgaagcgggtccggtaaaaggcggtactacggttatcgcgtttgtggaagatccggacggttacaaaattgagttaatcgaagagaaagacgccggtcgcggtctgggcaactaatctcctgccgggcgtgaactcatcgcgcccgcatctttactgcatcgacaagtaatatttgtcataatgcgcgctgcaatttatccgtattaagagaatcagatgtccgataacgctcaacttaccggtctgtgcgaccgttttcgtggtttttatcctgttgtgatcgatgttgaaacagccggatttaacgccaaaaccgatgcgctgcttgagattgccgccatcaccctgaaaatggatgaacaaggctggctgatgccggacaccacattacatttccacgtcgaaccatttgtcggcgcaaatttgcaaccagaagccctcgccttcaacggcattgacccgaacgatcccgatcgcggcgcggtcagcgaatacgaggcgctgcacgaaatttttaaagttgtacgtaaaggtattaaagcgagcggctgtaaccgcgccattatggtggcgcacaatgccaattttgatcacagctttatgatggccgccgcagaacgcgccagtctgaaacgtaacccgttccaccctttcgccacttttgacactgctgcactggccgggctggcactcggacaaaccgtattgagtaaggcttgccagaccgctggcatggacttcgacagcacccaggcgcactccgcgctgtacgacaccgaacgcactgctgtgctgttttgtgaaatcgtcaaccgctggaaacgtctgggaggctggccgctatctgccgccgaagaggtgtaatcgagtcgatgcctgatgacatgcaatgattcaggcatctatagtgaggctattccacgcatcctgcatgatattcacggggaatagcgttaatggcagataatccagaccctagtagcctcctgccggacgtgtttagtccggcgacccgcgactggtttcttcgcgcctttaaacagccgaccgctgtccagccgcaaacctggcatgtggcggcgcgaagcgaacatgcgctggtgattgcaccgaccggctccgggaaaacgctggcagcatttctctacgccctcgatcggctcttccgcgaaggcggcgaagatacccgcgaggcgcataagcgtaaaaccagtcgcatcctctatattagtccgataaaagccctgggcaccgacgttcagcgcaacttgcagatcccgttgaagggtattgccgatgaacggcggcggcgcggcgaaacggaagtcaatcttcgcgtagggatccgtactggcgatacgcctgcacaggaacgcagcaaactcacccgtaatccgccggatattctgatcaccacacccgaaagtctctatctgatgctgacctcccgcgcgcgcgaaacgctacgcggcgtcgaaacggtaattattgatgaagtccacgcggtagcgggcagtaaacgtggtgcgcatctggcgttaagtctggagcggctcgatgcgctgctccacaccagtgcacagcgaattggcctttctgccactgtgcgcagtgccagcgatgtggcagcatttcttggtggcgatcgcccggttacggtagtcaacccgcccgcaatgcgccatccgcagatacgaattgtcgtaccggtcgccaatatggatgatgtcagtagcgtcgccagcggcaccggcgaagacagccatgccggccgggaaggctccatctggccatatattgaaacgggtatccttgatgaagtgttgcgccatcgcagcaccattgtctttactaatagccgggggctggcggaaaaactgacggcacgattaaatgagctttacgccgcacgcttacagcgttccccgtctatcgccgttgatgcggcccatttcgagagcacctccggcgcaacctctaaccgtgtacaaagtagcgacgtttttattgcccgcagtcaccacggctccgtctctaaagaacaacgagcaatcaccgaacaggcgctgaaaagcggtgaattacgctgcgtggtcgcaacctccagtcttgaactggggattgatatgggcgcggtggatctggtgattcaggtggcaacgccgctttctgttgccagtgggttacaacgcattggtcgcgccggacatcaggttggcggtgtatctaaagggctgtttttcccccgtacccggcgtgatttagtcgattccgcagtcattgtagagtgtatgttcgcaggcaggctggaaaacctgacaccaccgcataatcctctcgacgtccttgcgcagcaaaccgttgccgccgcggcgatggatgcattacaggtagacgaatggtactcccgcgtacgccgtgccgcaccgtggaaagatctgccaagacgtgtttttgacgccacgctggatatgctttccgggcgctatccctctggcgatttttctgcttttcgccccaaactggtctggaacagggagaccgggatattgaccgcccgacctggcgctcaattgttggcggttaccagcggcggcaccattccggatcgtggcatgtatagcgtgttattacccgaaggtgaagaaaaggccggtagccggcgggtgggtgaactggatgaggagatggtatatgagagccgggtgaacgacattatcactctcggcgctaccagttggcggatccagcaaatcacccgcgatcaggtgattgtgactcctgctccgggtcgttctgcccggctccccttctggcgtggtgaaggtaacggacgtccggctgaattaggcgagatgatcggcgattttcttcatttgctggcggatggcgcgttcttttccgggactattcccccgtggctggcagaagaaaatacgatcgccaatattcaggggttgattgaggagcagcgcaacgcgacgggcatcgttccggggagtcgccatctggtcctcgaacggtgccgtgatgaaattggtgactggcgtattattttgcactctccctatggaagacgggtgcatgaaccctgggcggtggcgattgccgggcgaatacatgcgctatggggcgctgacgcgagcgtggtcgccagtgatgacggcattgttgcacgtattcctgacaccgatggtaaattgcccgatgccgcgatttttttgtttgaaccagaaaagttgctgcaaattgtccgcgaggcggtaggcagcagcgcacttttcgccgcccgttttcgcgaatgcgccgcgcgggcattattaatgccggggcgcactccgggccatcgcaccccgctttggcaacaacggctgcgcgccagtcagttgctggaaatcgctcagggatatccggattttccggtcattctcgaaaccctacgcgaatgtctgcaagatgtttatgatcttcccgcactggaacgtttgatgcgtcgcctgaacggtggcgaaattcaaatatccgatgtaacgaccactacgcccagccctttcgccacaagtttattgttcggctatgtcgcggaatttatgtaccagagcgacgccccgctggcagagcgccgggcatccgtactgagcctggacagcgagttactgcgcaatctactcggacaggtcgatccgggggaattactcgacccgcaggtcattcgccaggtggaagaagagttgcaacgactggctcctggcagaagagcgaaaggtgaagaaggattgttcgacctgctgcgcgaactggggccaatgaccgttgaagacctggcgcaacggcatacaggcagcagtgaagaggttgcgagctatctggaaaatcttcttgcagtaaaacgaatcttcccagcgatgattagcggacaggagcgtcttgcctgtatggatgatgccgccaggctgcgtgatgccctcggcgtacgactaccagagagtttgccagagatttatttacatagagtcagttacccgcttcgcgacctctttctgcgctatctccgggctcatgctctggtcacggctgaacaactggctcatgagtttagtctcggtattgccattgtcgaagagcagcttcagcaactgcgtgaacagggtctggtgatgaatctgcaacaagacatctgggtgagcgatgaagtatttcgtcgtctgcgtttgcgcagcctgcaagccgccagagaagcgacgcgtcccgttgcagccacgacctatgcgcgattgctgctggaacgtcagggcgtattacccgccaccgatggtagcccggcgctctttgccagtacaagcccaggcgtttatgagggcgtagatggcgtgatgcgggtgatcgaacagcttgccggagtcggtttacccgccagtctctgggaaagccagatcctgcctgcccgcgtacgcgactatagcagtgaaatgctcgatgaattactggcaaccggtgcggttatctggagcgggcaaaaaaaactgggtgaagatgacggcctggtggcactgcatctacaggaatatgctgcagaaagcttcactcccgccgaagcggatcaggcgaatcgtagcgcgctgcaacaagcgatagtcgctgttctggctgacggaggagcctggtttgcacaacaaatcagccaacggatacgcgacaaaatcggcgaaagcgttgatctctctgccctgcaagaggcgttatgggcgctggtctggcaaggcgtcatcaccagcgacatttgggcaccgttacgcgccctcacccgcagcagttccaacgcacgcaccagtactcgccgcagtcaccgggctcgtcgtggacgtcctgtctatgcgcaacccgtcagcccgcgggtatcttacaacacaccaaatctggctggacgctggagcttattgcaggtggagccactaaacgataccgaaaggatgctggcgctggcggaaaatatgctcgaccgctacggcatcatcagtcgtcaggcggtgatagccgaaaatatccctggcgggtttccaagcatgcaaacgctttgtcgaagtatggaagactccgggcgaattatgcgaggtcgttttgtagaaggtctgggtggcgcgcaattcgctgaacgtctgactattgaccgattgcgcgatctggcgacacaagccacgcaaacgcgccactatacaccagtggcgctctctgccaacgatccggctaatgtgtggggaaatcttctgccctggcctgcacatccggcaacgctggttccaacgcgtcgggcgggtgcgctggtggtcgtttctggcggcaaattgttactctatctggcgcaaggtggcaaaaaaatgctggtctggcaggaaaaagaggaattactcgccccagaggttttccacgcgctgactaccgcactgcgtcgcgaaccacggctgcgctttacgctaacagaagtgaatgatctaccggtccggcaaacgccgatgtttacgctgctgcgtgaggcgggatttagtagtagcccacaagggctggattggggataaagaaaggactgacggatgcccgttcgcatccgtcagtattgcaggacggattattccgcgtccggctcttcagacttgtatttagcggcagtttctttgatcagctgctgcagttcgccacgctgatacatttcgatcacgatatcacaaccgccgaccagctcgccgtcaacccacagttgcgggaaggtcggccagttagcatatttcggcagttccgcacgaatgtccggattctgcagaatatcaacataggcaaaacgttcgccacatgcggcaagcgcctggactgcctgggcagagaaaccgcagctcggcagtttcggactacctttcatgtacagcaggatcgggttttcagcaatctggcgttggattttttcgatagtggtgctcattgtcttgcttcctcaaacttctttacggcagtaatctgacattgtagcgggtcagtgcggcatcggaaaataacattttcatcacgcttttgctattttatccctttgctctatttgttgcatttcaaatattcgtttcttctctgatgccggcaaactggcgtatttataaccatttttagctttcactgctgcatttttttgcgctcgccaacgaaacgtattttttaacaataaaagctattaactttctcttcttctatgcattagaatcatcaagttttgtaaatcagacgcaggcatgatagacctgcctttacagagggacgctcagtggcgcggataaaccgtattagcatcacgctctgtgctttactttttaccaccctgcctttaacgcctatggcccatgctagtaagcaagccagggagagttctgctaccactcatatcaccaaaaaagcagataaaaagaaaagcacggcaaccaccaaaaagacccagaaaacagcgaaaaaagccgccagtaaaagtacgaccaaaagcaaaaccgcttcttccgttaaaaaatcttccattaccgcttctaaaaacgccaaaactcgcagcaaacacgccgtcaataaaacggccagtgccagctttaccgaaaagtgtaccaaacgtaagggctataaaagccattgtgtgaaagtcaaaaatgccgcgagtggaactcttgccgacgcgcacaaagcgaaggtgcaaaaagctacgaaagtggcaatgaataaactgatgcagcaaattggtaagccatatcgttggggtggcagcagtccgcgtaccggttttgattgcagcggcctggtttattacgcttataaagatttggtgaaaattcgtattccgcgtacggcgaatgaaatgtatcacctgcgtgatgcagcgccaatcgaacgtagtgaactgaaaaacggcgacctggtctttttccgtactcagggacgcggcacagccgatcatgtcggcgtgtatgtcggcaacggcaaatttattcagagtccgcgcacaggtcaggaaattcaaatcacttctctcagtgaagactactggcagcgccactatgttggcgctcgtcgggtaatgaccccaaaaacacttcgctaaaactttaccctgttgttacggcaacagggtaagttcatcttttgtctcaccttttaatttgctaccctatccatacgcacaataaggctattgtacgtatgcaaattaataataaaggagagtagcaatgagtttcgaattacctgcactaccatatgctaaagatgctctggcaccgcacatttctgcggaaaccatcgagtatcactacggcaagcaccatcagacttatgtcactaacctgaacaacctgattaaaggtaccgcgtttgaaggtaaaagtctggaagagattattcgcagctctgaaggtggcgtattcaacaacgcagctcaggtctggaaccatactttctactggaactgcctggcaccgaacgccggtggcgaaccgactggaaaagtcgctgaagctatcgccgcatcttttggcagctttgccgatttcaaagcgcagtttactgatgcagcgatcaaaaactttggttctggctggacctggctggtgaaaaacagcgatggcaaactggctatcgttagtacctctaacgcgggtactccgctgaccaccgatgcgactccgctgctgaccgttgatgtctgggaacacgcttattacatcgactatcgcaatgcacgtcctggctatctggagcacttctgggcgctggtgaactgggaattcgtagcgaaaaatctcgctgcataataactgatggcaaatgcagcattgcctgaagcgctacgcttatcaggcctacgcggatcatcgatgtaggtcggataaggcactcgccgcatccggcaagataaatcgcacgttgtcagcaactgtaacgcagaaggttatccttctgcgtttttgtttaattagctgttagcaacgcaaactgtttcaggttgttttctggcactcataaacaccagcaataatgccagtcccgcgacaatcgctcccatcaccggcacaaagctgtatcccagcccagcggaaattaccgcaccaccagcagctgctcccagcgcatttccaagattaaaggcaccaatattgacactactagacagacctggcgcttcactggcgacacgcatcacgcgcatctgtaacggcggtacgaccgcaaaggttgctgcgccccacaccaccatgctaatagctgcgccgaactcattgcgggccaggaacgggattgccagcataatcaccatcaacaacaacaaaaagcctttcaacgtgccgttaacactacgatctgccagtttgccgccgagatagttaccgatagagaatccgacaccaatcagcaccagcattgccgtgacgaacaccggtgttgcgtgggtaatactttgcagtaccggagagatataggtgtagagagtaaacattgcaccagctcccagtaccgtcgtcagcaatgcagacagcacctgcggacgcattaataccgccagctcttttttcacttcaggtcgtgcccctgcaccacctttaggtaaactgaagaacagacttaccatactaatcactcccagccccgccgttgccagaaaactcatccgccagccgatggtttcacccaaccaggtcgccgccggcacgccaccgatatttgccagggttaaccccataaacatagtggcaactgcgctggcctgtttatgttttggcaccacgcttgcggccacgacactacccaaaccaaaaaatgctccgtgattcaggctggtcaaaatgcgactaagcatcagggtcatataatccggcgcgatggcggaaagtacgttgccgagcgtgaaaattgccatcaggaaaatcaacgcactgcggcgggcacgatgagaaagtagaagcgtcatcagcggcgcgccaaccattacgccaactgcataggcactgattaacattccggcagcgggaatgctgacatccacaccgcgcgcaatgacgggcaacaagcccattgggctgaactccgttgtcccgataccaaacgcgccaatcgccagcgccagcaacggatagttaattttcatgccttatctccacctcttcgcgtcattacgcgatattcattaaagtggcgaaagcatgacagcaatcacaaaaaaatgaaaataacaaaaagagaaaacacttttgccattttgctaacaaacaggaaggagatgcgagggagaacgcgctccctcgagaggaaatcagtgcagcgcggcagtcaaacccacggctacgatcaaaccgaggacgataatcgttgttaccagtgaaaatttaaggtcggtgctcatcaagttttctccttttttattaccacacaaaaagtgatattacgcatttttacacactgtgatgaaaaaatctcccgtcatttataatgataagtgtttttaccacttccccttttcgtcaagatcggccaaaattccacgcttacactatttgcgtactggccattgaccccttcctgacgctccgtgtcgtttttccggcgtaccgcaacacttttgttgtgcgtaaggtgtgtaaaggcaaacgtttaccttgcgattttgcaggagctgaagttagggtctggagtgaaatggaatggcaacaataaaagatgtagcgaaacgagcaaacgtttccactacaactgtgagtcacgtgatcaacaaaacacgtttcgtcgctgaagaaacgcgcaacgccgtgtgggcagcgattaaagaattacactactcccctagcgcggtggcgcgtagcctgaaggttaaccacaccaagtctatcggtttgctggcgaccagcagcgaagcggcctattttgccgagatcattgaagcagttgaaaaaaattgcttccagaaaggttacaccctgattctgggcaatgcgtggaacaatcttgagaaacagcgggcttatctgagcatgatggcgcaaaaacgcgtcgatggtctgctggtgatgtgttctgagtacccagagccgttgctggcgatgctggaagagtatcgccatatcccaatggtggtcatggactggggtgaagcaaaagctgacttcaccgatgcggtcattgataacgcgttcgaaggcggctacatggccgggcgttatctgattgaacgcggtcaccgcgaaatcggcgtcatccccggcccgctggaacgtaacaccggcgcaggccgccttgccggttttatgaaggcgatggaagaagcgatgatcaaggtgccggaaagctggattgtgcagggtgactttgaacctgaatccggttatcgcgccatgcagcaaatcctgagccagccgcatcgccctactgccgtcttctgtggtggcgatatcatggcaatgggcgcactttgtgctgctgatgaaatgggcctgcgcgtcccgcaggatgttagcctgatcggttatgataacgtgcgcaacgcgcgctattttacgccggcgctgaccacgatccatcagccaaaagatagcctgggtgaaacagcgttcaacatgctgttggatcgtatcgtcaacaaacgtgaagaaccgcagtctattgaagtgcatccgcgcttgattgaacgccgctccgtggctgacggcccgttccgcgactatcgtcgttaatcacccgttgcgggagtctcttccggctcccgcagccactccttattcagcgtctcactatcgccgagatactcaagcaaccaggttaacgcagggctcatatcattttgctgccatgtcagacaacatgcgctatccggaaaggggttttccagttctaatgctacccacttcccctcattaagccacggtttggcgaaatgtgttggcaccatccctatgcataatcctgcgctgatacaggttgcgctactttcccagtcaggcacgacaactcttttttggttatccagcaaccaggtaatacgtttaggtagcgttcggctggtgtcttcgcgcaccaagctcggccagttgcgcaacgtatcatcgctgaacgggccatccatcaacgccagcgggtggtgactggcaacaacgcaactccagcttagcatccccatatcccggaaggcataacgaccgcctaccggaatcgcgcgtgttgcgccaatcgccagttccacgcgcccgtcggaaagcgcatcccagacaccgttgaacacttcctgaaagacaagaagttcgacatcatcaaaatggcgataaaaatcaacgatcatctgccgtgtacgttctggcctgacaatattatccactgcgatagctaactgaccgcgccagccgttcgctatctgctgacattgctggcgggtgatctgcatttttttgacaacagagcgcccttctttgagaaaccacgctccagcagcggtcagctccacatcacggtgccgtcgttcaaagagcggcaccgccagccactcttccagctgacgcacggtatagctgaccgcagaaggaacgcgatgcagctcctgtgccgcagcgctaaaactaccattacgcgctaccgcatcaacaacttcgagactatattcactccacatagtctgcctgcaaaatttttgaaaccagtcatcaaatattaccgtttcacaacactaatttcactccctacactttgcggcggtgtttaattgagagatttagagaatatacatgcaacctgggaaaagatttttagtctggctggcgggtttgagcgtactcggttttctggcaaccgatatgtatctgcctgctttcgccgccatacaggccgacctgcaaacgcctgcgtctgctgtcagtgccagccttagtctgttccttgccggttttgccgcagcccagcttctgtgggggccgctctccgaccgttatggtcgtaaaccggtattattaatcggcctgacaatttttgcgttaggtagtctggggatgctgtgggtagaaaacgccgctacgctgctggtattgcgttttgtacaggctgtgggtgtctgcgccgcggcggttatctggcaagcattagtgacagattattatcctagtcagaaagttaaccgtatttttgcggccatcatgccgctggtgggtctatctccggcactggctcctctgttaggaagctggctgctggtccatttttcctggcaggcgattttcgccaccctgtttgccattaccgtggtgctgattctgcctattttctggctcaaacccacgacgaaggcccgtaacaatagtcaggatggtctgacctttaccgacctgctacgttctaaaacctatcgcggcaacgtgctgatatacgcagcctgtagtgccagtttttttgcatggctgaccggtagtccgttcatccttagtgaaatgggctacagcccggcagttattggtttaagttatgtcccgcaaactatcgcgtttctgattggtggttatggctgtcgcgccgcgctgcagaaatggcaaggcaagcagttattaccgtggttgctggtgctgtttgctgtcagcgtcattgcgacctgggctgcgggcttcattagccatgtgagcctggtcgaaatcctgatcccattctgtgtgatggcgattgccaatggcgcgatctaccctattgttgtcgcccaggcgctgcgtcccttcccacacgcaactggtcgcgccgcagcgttgcagaacactcttcaactgggtctgtgcttcctcgcaagtctggtagtttcctggctgatcagtatcagcacgccattgctcaccaccaccagcgtgatgttaagtacagtagtgctggtcgcgctgggttacatgatgcaacgttgtgaagaagttggctgccagaatcatggcaatgccgaagtcgctcatagcgaaagtcactgatctatatcgatatacttatacttaggctgctaacaaaattttgttgtatgattgaaattagcggcctatactaatttcgagttgttaaagctacgataaatattatgtttttacggggacaggatcgttcccgactcactatggatagtcatttcggcaagggttcctcctttccctctgttctacgtcggattatagactcgcggttttttctgcgagatttctcacaaagcccaaaaagcgtctacgctgttttaaggttctgatcaccgaccagtgatggagaaactatgagtagtagctgtatagaagaagtcagtgtaccggatgacaactggtaccgtatcgccaacgaattacttagccgtgccggtatagccattaacggttctgccccggcggatattcgtgtgaaaaaccccgatttttttaaacgcgttctgcaagaaggctctttggggttaggcgaaagttatatggatggctggtgggaatgtgaccgactggatatgttttttagcaaagtcttacgcgcaggtctcgagaaccaactcccccatcatttcaaagacacgctgcgtattgccggcgctcgtctcttcaatctgcagagtaaaaaacgtgcctggatagtcggcaaagagcattacgatttgggtaatgacttgttcagccgcatgcttgatcccttcatgcaatattcctgcgcttactggaaagatgccgataatctggaatctgcccagcaggcgaagctcaaaatgatttgtgaaaaattgcagttaaaaccagggatgcgcgtactggatattggctgcggctggggcggactggcacactacatggcatctaattatgacgtaagcgtggtgggcgtcaccatttctgccgaacagcaaaaaatggctcaggaacgctgtgaaggcctggatgtcaccattttgctgcaagattatcgtgacctgaacgaccagtttgatcgtattgtttctgtggggatgttcgagcacgtcggaccgaaaaattacgatacctattttgcggtggtggatcgtaatttgaaaccggaaggcatattcctgctccatactatcggtagcaaaaaaaccgatctgaatgttgatccctggattaataaatatatttttccgaacggttgcctgccctctgtacgccagattgctcagtccagcgaaccccactttgtgatggaagactggcataacttcggtgctgattacgatactacgttgatggcgtggtatgaacgattcctcgccgcatggccagaaattgcggataactatagtgaacgctttaaacgaatgtttacctattatctgaatgcctgtgcaggtgctttccgcgcccgtgatattcagctctggcaggtcgtgttcagtcgcggtgttgaaaacggccttcgagtggctcgctaaaggctattctatcgccccctctccgggggcgatttcagatcaggcttctgtgcctggttgattcatggcattttctcgtgccgccagcacacgttctaccgtatctaccactgcctgagtttgtggatcgatttcaatgttgacgcgtgcgccaagttttttcttcccaagagtcgtgcgttccagtgtttcccgaattaaatggacgcaaaaacgcgttggcgtgacttcgccgacggtcaggctaataccgtcgatgccaataaatcctttgtacagaatatatttcatcaactgactatcctggactttaaaccagatctggcgattattttcactggttaatattttcgccacttcagcagtggtcataatatgaccactcattaagtgtccgccaatttcatcactgaatttcgccgcacgctcaacgtttacccaatcccccacttttaaatcgccaagattggtaatgcgtaacgtttctttcatcaggtcaaaactgacatggttgccgttaatttccgtcacggtcaggcagcaaccgttatgcgccacggaagcaccggtttccaggccgtccagcatgtggtcgggtaactccaccacatgcgtacgaaaatttggtttctcgtcaatgctcaccagttttgcggtgccctgtacaatccccgtaaacatacttacaactcctgaaatcagttaagacattctgttcagcacaatagcaggtggaaaacgcccttaccagtgaaggggtaagaatggctattttttcactggagaattaataaatcctcgctacaatagactgaatttcccctgcttcttctttttgctgcccattcaggcggctttttagtctctcatataactacaaataaaaggtgttcacgtgcagaagtatatcagtgaagcgcgtctgttattagcattagcaatcccggtgattctcgcgcaaatcgcccaaactgcgatgggttttgtcgataccgtgatggcgggcggctatagtgccaccgacatggcggcggtcgctatcggtacttctatctggcttccggcgatcctctttggtcacggactgctgctggcattaacgccggttatcgcgcaattaaatggttccggtcgacgtgagcgcattgcgcatcaggtgcgacaaggtttctggctggcaggttttgtttccgttctcattatgctggtgctgtggaatgcaggttacattatccgctccatggaaaacatcgatccggctctggcggacaaagccgtgggttatctgcgtgcgttgttgtggggcgcgccgggatatctgttcttccaggttgcccgtaaccagtgtgaaggtctggcaaaaaccaagccgggtatggtaatgggctttatcggcctgctggtgaacatcccggtgaactatatctttatttatggtcatttcggtatgcctgagctcggtggcgttggttgtggcgtggctactgcggcggtgtattgggtcatgttccttgccatggtttcttacattaaacgcgcccgctccatgcgtgatattcgtaacgaaaaaggcaccgcaaaacccgatcctgcggttatgaaacgactgattcaactcggtttgccgattgcgctggcactgttctttgaagtgacactgtttgccgtcgtggctctgttagtgtctccgctcggtattgttgatgtcgcaggacaccagattgccctgaactttagtagtctaatgttcgtgcttccaatgagcctggcggcagcggtaactatccgcgtaggttatcgtctgggtcagggcagtacgctggatgcgcaaaccgctgcgcggaccgggcttatggtgggtgtctgtatggcaaccctgacggccattttcacggttagtctgcgggagcaaatcgccctgttgtacaacgacaatcccgaggttgtaacgctggctgcgcatttgatgttgctggcggcggtatatcagatttctgacagtatccaggtgattggcagtgggattttgcgtggttataaagatacgcgttccattttctatattacctttacggcttactgggtgctgggcttgccaagcggctatattctggcactgaccgatctggtcgttgaacctatggggccagcaggcttctggataggctttattattggcctgacgagcgcagccattatgatgatgttgcgtatgcggttcctgcaacgtctgccgagtgccatcattctgcaacgagcatcccgctaataaagacaaggcgcaaccttcacgggttgcgcctgtatttttacgcaggctggagcgttgcgccaatcccgtcttcgtctggctgtaatttcagagcgttacacagagtttgccgactggcatctgttatctcaacgtgtatatccccggtaacttcccctttcacattgatgaagtcaggactaatttcttttgcactggtttgcaggcaaatcgctccctctccgcgcaggcgtttcactttcagttgcacatgcgttgccgcatcagtgatcagccacagttttccaccattcagattgatgttaccaacaatgaaagtgacactgtcaccttttaccgtactgccgtctagaatcaacacaccgccctgctgtacagtaatcgtactttgttgcagctctgcgccataaccaataatcatactagcgccgtccagtaatgcaacactcccggtcagttcaaccggtgcgcgatcttcctctacgacaaaattttcgtccgcgctggtgggactcaacaggatcactgtcccaccttgtattaccgcgttttccagcgtaccggcatgcacttcagcccgaccacccacattcacggacaggttttgcgtcttaccggaactgtagagctgaaggccatccgtccccagacgataaatggatccattctcaacaatagtgtcagagtcttcaccaccgagattattcatggtgccaccagcaagcaacgtatcactggctttcccggccagcataaaaacgccgccctgattaatctcacaattgctggcttccccacctggatacaccaacaattcaccaccttcatctaccacgaccgcactggttgtcccattaaccaacaggccgccctcttgatcgagaatgattttttccgcgcgatgtccttccagtacacgcaggttaccgccattttccagcaacaaaccgcaggcataacctttatcaacgctgaattcaccttcgggatggcggccattaaccgtagcgagcgtagagagactaattgcgcctccctcggactgaacaatatctgtggcaatggcaccatcgctgacgcttagcgtgccattgttaccgtactgtgtgcatttggcgatcccaccggttgccactttcaaccagccagcccccgtgaccacggtattttcggctcttccgccagcttcaacaatcaactcgccttcagtaagttgcgtcgcgccaatgacctcgccggtcttaacaatttgcacgttcccgtcgctcatcaagtttttcgcatcagatcccatgatttattcctttgctgcatctgtgtgcctttattgctacctaagtgtaaaggctacggaggatttatccacgacagatttgagatggtggcaaacaactctgtttaaactctgatacacgaattattgggttgtatcagatgtaaatgcgatcctgaataaaaatcacccttgcaaatcaacaaaatatagccaatttgcttaaaagctctgcaaacggtcgaaatagcgcagaaaattacgttttgcctcttgccaccttcccactctgccgctaatattcgtccccgttgtcacctacaacgttgcgttcatagctcagttggttagagcaccaccttgacatggtgggggtcgttggttcgagtccaattgaacgcaccatcctgcgtccgtagctcagttggttagagcaccaccttgacatggtgggggtcggtggttcgagtccactcggacgcaccagattttcttaatctggtcttctcctttttccctctgtttcttctctgtatccaatacgttaaaagatttacactgtcttcgtatgcgttatcagaaggagaatcgctatggcaactttgttacaacttcattttgcttttaatggcccatttggcgacgcaatggctgagcagcttaaaccacttgctgagagcattaatcaggaacctggttttctgtggaaggtatggacagaaagtgaaaagaaccacgaagccggtgggatctaccttttcactgatgaaaaaagcgcccttgcctatctggaaaaacatactgcccgactgaaaaatctcggcgttgaggaagttgtcgccaaagttttcgatgtcaatgagccacttagtcaaatcaatcaggcaaaactcgcctgacagaatttaatcaagggcggttagcgcccttttcatccctgtctgaaatttctcaaattctaaaaatctcaaccaaacttatctgataacactaaattcgaaagaatgcgtacaggtaagtaacaatgaaaaaaattgctattgtgggtgccgggcctacggggatctacaccttattcagccttctacagcaacaaactccactttctatttctatcttcgagcaggctgacgaggccggtgtcgggatgccatacagtgatgaggaaaacagtaaaatgatgctggcaaatattgccagtattgaaataccgccgatttattgtacgtatctcgaatggctacaaaagcaagaagacagccatctccagcgttatggcgttaaaaaagaaaccttgcacgatcgtcagtttttaccgcgaattctgctgggcgaatatttccgcgatcaatttttacgactagtagaccaggcacgacagcaaaaatttgcagtggctgtttatgaaagttgccaggttaccgatctgcaaattacaaatgctggcgtcatgctcgctacaaatcaggatttacccagcgagacgtttgatttagcggtgatcgccacgggtcacgtctggcctgatgaagaagaagcaacccgaacgtattttcccagcccgtggagtggcctgatggaagcaaaggtcgatgcgtgtaacgtgggtattatgggaacatccttgagcggactggatgcggcaatggcagtggctattcagcatggtagcttcattgaagatgataaacaacacgtcgtttttcaccgcgataacgcaagtgaaaagctaaatatcacgttgttgagccgcacgggtattttacccgaagccgatttctattgccctattccctacgagcccttacacatcgtcaccgatcaggcattaaatgctgagattcaaaaaggcgaagagggccttttggatcgggtatttagattgatagtagaggaaatcaagtttgctgatccagactggagtcaacgcatagccttagagagcctgaatgtcgattcctttgctcaagcctggtttgccgagcgcaaacaacgcgacccatttgactgggcagaaaaaaatctccaggaagtcgaacgcaataaacgagaaaaacatactgttccctggcgttatgtcattctgcgcctgcatgaagccgtacaggaaattgttccacatctgaatgaacacgaccataaacggttcagtaaaggccttgcccgggttttcatcgataattatgcggcaatccctagtgagtctattcgtcgcctacttgccttacgtgaagcgggaatcattcatattctcgccctcggtgaagactacaaaatggaaattaatgagagccgcaccgtcctgaaaacggaagacaacagctacagctttgacgtttttattgatgcccgcggacaacgtccgcttaaagtgaaagatatccctttccctgggctacgcgagcaattacagaaaacaggggatgaaatccctgatgttggcgaagattatacgttacagcaacccgaagatattcgtgggcgcgtagcgttcggcgcgttgccctggttgatgcacgaccagcctttcgttcagggacttacggcatgtgcagaaattggtgaggcgatggctcgggcggtcgtaaagcctgcatcccgtgctcgtcggcgtcttagctttgattaaaggtaaagctatcagcactcaacaaactgatgctgttcattaagacgatagcggactccggctcgaatattgttttcaccttcaatggcgacggcgaagcgaactctttcgccgtcatgatatgccagtgcggcgcttcctcctggcccgagaataatactgtcgaccacgcccgtgctcactaccgtactattttcaccgctggcaatgatgtgtacattgtcgccgctgttggcaattctggcgtttgcgccaaagctggcgatttgcaccaggtcaccattactggcgacatgacaccgttcacccaatgtacaaacgcgtactcgcattccggtattcgcaatccgactgctatctccagcgctgcttatccggctagaattaccggttacagcaacccgtgcgcgttcaccggagctgccaatgtgactgttaaagccgacacttccaatccgcacgctataacccatactggcaatttgcgcggcatacccagcggttgcgattctggcgttatcctcacaacagccgatgcgagcatgatcgtcgctgcgggcaaactgactgcaaaatggtctctctccggggtctgtggccagtttttgcatagaggaaacttcctgatgcgcgaagttttcatccgccagccattttttccacgcatactcaaccagactctccgcccagtccgtatatccttcctcaatcagtgcatgatgaatatcggcataactaccgccgcgtgggaaatggcgcaggaaccagcgatacatcaccgctccgatacgccattctcgcaggtctgcttgtgtaatgatcattcgttagtgccggtgatagccatcgaccatgcttttaaaggtttcgtgtggcgtacgccccgtggtgcaaagataaagatgaccgaagataaaaaagaggcttataaatgccagagcaaaatgtgtctgcaataaccagtatcttacgccaggaaacacatctcccacggcttgcggatagagacacagcagccccgtcaatagtaacaacggcagcaatccatacatgacaccaacataggcgacctgctgtaagggattaaatttagactgggttgttgccgggaaaggatgttcttccccctgcataatgccaaacaaataaaatcgcgtttgttttgccgctcgttccagccacccctgacgacgaatgcgatagtggtgaccattatccccaacggcattgatcagcacaaagccgagccagcatgccagtaacaaaaatccgcaaacttcatgcaccgcaaccagacttttaaccgcagttgcgcccaccatcgcaaagtgatttatcagcccactggccagcaacaatacaaagagtaacgcattgctccagtgccataatctgaccgctttgctgtaaagataaatcttctcaccatgatcggtggcacttttcttcacgccacgagcacgaagcaaggcatgcagccccagcaccaaccacatcccaaccagcaatactccggcaatgatcaaccacaccggccaaaattcgggagtgaactgtggcacatagttcgctaactggctctgaaactgttcagcatgttggctcgggttcatacattttcctttttaatcaaatgttgaccgaaccggcgatacagatgcggtttcccggcaccaggtagctgatattgatagtatttattttgctgcaaccacgcctgaatttctgggctatcttcgcgaccaaagatcaatgcgtgttccgggcaggcgctgacgcaaatgggcggaaagccttttgccagtcgggactcagcgcagaaatcacatttatctgccactttagtgacagggttaaggtagcgaacctggtacggacaagcgccaatgcaataactgcagccgatgcactggcttttttctacccgcacgatcccctgctcatcacgccagctcgcccccgtcgggcaaacgtcgatgcacggagcatcttcgcagtgctgacaactctggcgaaaaaagtgatactgcgtttcgttgtcgttatcggtgactggaatgtgtgctatgcttaaacggcttccctgagcggggacgtggttagttttacggcatgcgcgggcgcaaatattacagccattgcaccgactctcgtcatgaatcatggcataccgaacttccttttcttgcctcgtgttcgctaacagagaagacgcagaaccagtaaaaaagattactgttcccatccccagaacaaatttgcgtcgagtgaaggacatctgattatcccctaatgcagtggctgcaactgtccaccctatccatgacatctccctgaaatttcaggggttctgaaactgctctacctcgaaccattcgcataagccataagccttgccataggtcataaatcgctcgctaaacaagtacaacaccgccgtgctactctccacctgccgtatatcggcatattcaggtgcaacatccatcgcggcgatcgcggcttcaatctgcgcttcctggaagtaatatggcgcttgcatcagcatggcgactttgtaaggacgaggatacgtctggcactcaaaacgaacggcgtgtgcaatggcgcgacaaatgtcctgctccacaacttgcaaagacatcgccgcgtagttttcactcatggcctgcgtactgtaatagtaatcatccttgcttcccgtcaaacaagcgatatccgcgtagtctccgttctgcttaatgctttccagcaaaacactcagttcctcttctgcaaccaaatagggtgggctgagaaacacggcgcgcgccaccagctgcccagccgcagaatgctggcgaatgaactcagccaggatttcagcaggttctggttcggttaccgtatcaacggggtgacgcatcccctgcaaccattgccgcttcgcctcgtcaacttcgctgactttcgctaacggcaattcatcctgatggttcatcttacccattccttacgcaggcagtagattgtgtgctgccagatcggcggcaatatcttccagccccagacgctgcaatgtttcgcgggttggacaaccaagctgtgggtcccagcccatttctttgtagaacatcgtgaggctagcatgcatatcgtcacgatccattttgtcagtaccttcagtaaagaccgggatctgcggatccttgtcgaatacccaggaacagataagatcgtgttcattacgcatatctttggtttgcatcagttttaccgtgtaggcacgatgcaacgtaaaaatacgctctgcagctaaatctaatttttcctgagtcatctcttcgccggtgatcgctttgaagaatttggcttcaagcgccagatcgccccggtaattacggcttttcagcgggctaacggtcattggccagacccagttgcacagggtgacggcgttatgcaaacagacccgcaacaggctccactttgcatatttaatttttgcgtcattgattggcgtgtagtttttggtttcatcgtaagcatcttcagaaccaaaaagttctttcgccacttcacgttgcagtttcaatggcaagccggaaccaataaagttgatatgggtatgcgtcatgcagtcacggttgaacatacagttaacaatggaaccgacctgcgcactcgcttcattggcatggtgaaccggatagccaaacgggctccagagtttatttttcgcgtagccccagtactcttcacccaaattccagcgttctgcgatggcataactaccatcagccaggtgactcagctcacccacacgatgcgccagacggtagtaaaaatctttaatgaagttaacgtcacccgcttccagttgatcccagcgaatttctgcatactcttcagctggcagaacacgcttgaacacacctttgctgtaacaataagtaaagtcgcgatgcaactgcccgtagttacaccataggccgtagtcatcgaacaaattcagacccaccaggttaccaatcacacgaccatcgtctttatcttcaaaatctttcggcccgttcgggaagatggtggtatggacaaagtttgctacacaagtgttaccacctgtgctgggcacgccaaactctttcacccgaggaatattcatttgggtcatacaacggatcgggcaagagtggcagccgctcatttttactgtgtatttctctgccgccggtcctaagtcaaaaacggatttataggtacgaaagccgaccgtattctgattgcctggcggaatttcacccgtttcaatcggaccaccttcagccgcgccccaaaacagccctttacgtgctgtccagcgactcttgggatcactatactctgcccagctttgtggcgtacttggcacgacatggttgttattcgcaccaataagttcagtcatcatgtaatcattgagacgcttcatctcctgacgatcggcaatgttgacccctttcgtcccttcaaccgcaatcgctttcaggtttttgctacccattattgcgccagttcccgcaccgccgctgtggttacggctattcaacatgccagagagaggaacaaggttttccccagcctgaccaatagccgccacacaggtttccggactggtcaatcgacaaatttcttccgtcgttgcgcgcgtcccttttccccataagaaatcggctttttccaggctaactttgtcatctttaatcttcagccataccggacttttcgccttcccttcgataataatgacgtcgtatccagcgaatttcatttgcgctgcaaaaaagccacccatatgggcatcgacgactaaatttcctttggtaaaagtagaaagactggtgatatttacgcgagaactacagggggcaccagatccagttaatgggccggtagcaaagactaatttattcgcttcatcgaaaggtttcgtgcctggcggtacttcgtcatacataattttgtagccgaagcccatgccaccgacaaaacttttaaacttactggaatcttcgagggtaatatttcctgtcgtgagattgactcttaatatattacctgtccaaccgttagccatgattttttcctttgcaagattcacacagtaatatctttccactcgataatttttaacgcccctgttgggcaggcgtttgcgcattcaccgcataacacacatttgctggattttttactttcggtatttacggtggccatcatccacgggcatgccgtagtacaggcgctacagccaatacagcgtttatgatcgacggtaatacagccttctttctgctgccaggtaatcgcaccaatcgggcagacgttcatgcattgcggctctttgcattgacggcaggtgtccgcggtatagttgagatcgccatacaggccgccgccagagccaaccccgttgtcgccaaagaaataattgcgatggattttgatacgggagaagaatgtccctacactgccatcgttgaagttggtacaagagatttcacagcggtggcaacccgtgcatcgcgctcgctgggtcaccagcacccctttgggggtatttatcaaccctactgtgccgctatcaatatcttcctgtttgcaacccaaaagactcagtaacgcaggggcaattgttagaccagcaaggccttttccacttatacgcaagaattctaatcgcgttaagccaatatctaatagtggacgatcaaccgggttcatttatttcgcatcctcttcgcaaacacagtgctgacaattcagcagcctgatattaagcattcaactaatacgctgctgactctgtccccaacaccagatattttccctaacccgatagtgtatgagaaaagattaacgccgataaactaatcctttatggttaggagaaaaaataatgtgattattctgagcccttaacattgatcgttatcaattaaaattacaaagcaagaaattataagtgaactgatatttattatcatttgaaataaatttaacttaagcgacaattatttgtgactttcattgcagaaaataaaaataacattatcgctataaattaaaatacataccgaaattcgtataatttcagcagttgttatttagaatgattaactggaccgcaactgaagcaagaatatcaggatgaagcttaccgcctcatcctgaatggtcattttaccagtgcgttaatgacggtttccatcgcctgcttttccagctcactgcgctgaatgcgtttattggctaatgctgtacgtaatacgcctgcgataacaatatgctttggttcctgccccagatcgcgcatttccagcacaactttaccgacaactctgcacatttctcggtacagttcatcctcttttgtccgatttcccattctttatacctatttatcatgccaactatcagcatatatcaatctaaccaattaaacaaaaatcaaacaaaatcagacaaataacgcgataaattattttaactgtagcaattgagcgatgatatatttatacaccggatgaactttcacttatcctcacactgacaacttcggcaccagacgttgcgcaaacagtgaagtttttgcgtaaccttttccctggaacgttaaatctttgataacaatttattgtctaacaagttgtatattttttgaaacgctgtttttgttttccttttggattaatttcagcgtataatgcgcgccaattgactcttgaatggtttcagcactttggactgtagaactcaacgactcaaaaacaggcactcacgttgggctgagacacaagcacacattcctctgcacgctttttcgatgtcacctatccttagagcgaggcaccaccactttcgtaataccggattcgctttccggcagtgcgcccagaaagcaagtttctcccatccttctcaacttaaagactaagactgtcatgaaaaagaccaaaattgtttgcaccatcggaccgaaaaccgaatctgaagagatgttagctaaaatgctggacgctggcatgaacgttatgcgtctgaacttctctcatggtgactatgcagaacacggtcagcgcattcagaatctgcgcaacgtgatgagcaaaactggtaaaaccgccgctatcctgcttgataccaaaggtccggaaatccgcaccatgaaactggaaggcggtaacgacgtttctctgaaagctggtcagacctttactttcaccactgataaatctgttatcggcaacagcgaaatggttgcggtaacgtatgaaggtttcactactgacctgtctgttggcaacaccgtactggttgacgatggtctgatcggtatggaagttaccgccattgaaggtaacaaagttatctgtaaagtgctgaacaacggtgacctgggcgaaaacaaaggtgtgaacctgcctggcgtttccattgctctgccagcactggctgaaaaagacaaacaggacctgatctttggttgcgaacaaggcgtagactttgttgctgcttcctttattcgtaagcgttctgacgttatcgaaatccgtgagcacctgaaagcgcacggcggcgaaaacatccacatcatctccaaaatcgaaaaccaggaaggcctcaacaacttcgacgaaatcctcgaagcctctgacggcatcatggttgcgcgtggcgacctgggtgtagaaatcccggtagaagaagttatcttcgcccagaagatgatgatcgaaaaatgtatccgtgcacgtaaagtcgttatcactgcgacccagatgctggattccatgatcaaaaacccacgcccgactcgcgcagaagccggtgacgttgcaaacgccatcctcgacggtactgacgcagtgatgctgtctggtgaatccgcaaaaggtaaatacccgctggaagcggtttctatcatggcgaccatctgcgaacgtaccgaccgcgtgatgaacagccgtctcgagttcaacaatgacaaccgtaaactgcgcattaccgaagcggtatgccgtggtgccgttgaaactgctgaaaaactggatgctccgctgatcgtggttgctactcagggcggtaaatctgctcgcgcagtacgtaaatacttcccggatgccaccatcctggcactgaccaccaacgaaaaaacggctcatcagttggtactgagcaaaggcgttgtgccgcagcttgttaaagagatcacttctactgatgatttctaccgtctgggtaaagaactggctctgcagagcggtctggcacacaaaggtgacgttgtagttatggtttctggtgcactggtaccgagcggcactactaacaccgcatctgttcacgtcctgtaatattgcttttgtgaattaatttgtatatcgaagcgccctgatgggcgctttttttatttaatcgataaccagaagcaataaaaaatcaaatcggatttcactatataatctcactttatctaagatgaatccgatggaagcatcctgttttctctcaatttttttatctaaaacccagcgttcgatgcttctttgagcgaacgatcaaaaataagtgccttcccatcaaaaaaatattctcaacataaaaaactttgtgtaatacttgtaacgctacatggagattaactcaatctagagggtattaataatgaaagctactaaactggtactgggcgcggtaatcctgggttctactctgctggcaggttgctccagcaacgctaaaatcgatcagctgtcttctgacgttcagactctgaacgctaaagttgaccagctgagcaacgacgtgaacgcaatgcgttccgacgttcaggctgctaaagatgacgcagctcgtgctaaccagcgtctggacaacatggctactaaataccgcaagtaatagtacctgtgaagtgaaaaatggcgcacattgtgcgccattttttttgtctgccgtttaccgttactgcgtcacgcgtaacatattcccttgctctggttcaccattctgcgcactctctacactaggcgcattgctggctgcgggagttgctccactgctcacgctaaccggataccctgcccgacgatacaacgctttatcgactaacttctgatctacagccttattgtctttaaattgcgtaaagcctgctggcagtgtgtatggcattgtctgaacgttctgctgttcttctgcgcttagtggtcgatgtacttcaacataacgcatcccgttaggctccacggaatatttcaccggttcgttgatcactttcaccggcgttcccgtccgcacgctggagaacaaggctttaatatccggtgcattcatgcgaatacacccactactgacgcgcaaaccgacgctgtccggcgcactggtaccatgaatgaggtattcgccattaccatgcgcgaggcgcagtgcgtaacgtcctagcgggttatttggtccggcaggaacgactggcggtaatttaatgccacgctccaggctacgctgacgaatgcctgccgtaggcgtccaggttgggttagggattttctgcccaacacgcgtttccatcaccggcgtttccagcccctgcaatccaatacctattggataaacctgcacaatattttctcccggcggataataataaaggcgcagctctgcaaggttaacgataatcccctgacgcggtgcatcaggtaataacagttgactaggaatagttatcgtcgtaccaggttttggcaccggggcgatagtgttattggcttcaaggatcaacattgccgcagtatcaaaacgtcgggcaatagcctgaaggtttttatccccttcttgcaccgtatacgtttgattttgcccaaccagtcggcttccggttggtggtagcggataatcaaccgcccaggcagcctggatggcgctaaaagcgccgataagcgtgagtgtaagcaaagacgcgcgtttcattgtaaacctcctgtatttgccggagactcacgctgaaacgtcggatggcgcttatgttcacctgaaaccaaaacactcctgtgcaggtcagtgtaaacattgaccatccggcaatgtgagccaaccggatgaaagctgtccttttagtttagctaagtgcagcggctttggcgcgaattgcgcgaatcatcgcttccagaccttgactacgagatggggtgagatgttgggtgagcgccattttttcaaaccacggacgcacatcgaaattgacaatatcctgcggcgtcatctgatcgtagagaataaagacgaccgcaataagccctttcacaatcgccgcatcgctgtcgccctgtaattcaataattccctgggcattctggcgcatgacaatccacacctgactctgacagccctgaatgctattttgtggacttctgtcttcgtcgcgtaattctggcagacgctggcccagctcaataatgtagagatatttctcttcccagttggcgcagcgtaaaaaattacgcagcaacttttctttatccggcaataaagccatagtgcctccctgttatcccagcaaacggtgaatacgttgcaggccggtcaccagacgatccacttcttcatgggtgttatacatggccaggctcgcccgacacatcgcagggacgttgtaataggccatcaatggcattgcgcagtgatgtccggtacgcacagcaatgccgtaattatcgagaaaactgccaacatcataggcgtggtgtttaccgagattaaaagcaataacgccaagcctgttttgtgggccatagagagtgagatccggtacagattccagctgacttagcgcataatgcatcagattctgttcatactcggctatgttattaagccccagcgcgctaacatactccagcgccgcgccaagaccaatgatgcccccggtattgggtgtaccggcttcaaaccgccatggtgctttggtccaggtagtgccttcactcaggctgacggtggcgatcatagaaccgcccccttcccacggcggcatctcctgcaacaaggcttctttcacataaagaatgccaattccggtggggccatacagtttatgcccggagaacacgtaaaagtcgcaatccagcgcctgaacatccaccggatgatgcatcaccgcctgagcgccatccaccagcacttttgcgccatgctggtgcgcaagcgtgatcatttccgccagtggattttctgtgccaagcacgttggagacatgagtaattgccagcaggcgagttttctcatcaaacagcgtaggcagcgtctccagttgcaacgtaccatcgggattgagcgggatcacacgcagctctgcgccaacgcgtgcgcaaagcatctgccagggaacaatgttagcgtggtgctccatctgactgatgatgatgttatcgcccgcccgcacgttgctgttgccccagctattggcgaccagattgatcccttccgtcgtgccgcggacgaacaccagctcttccgcgctacgggcattaataaacaggcttgcccgcttgcgcacgttctccattttctcggtcgcctgggcgcttaaggtatgaataccacgatgcaccgccgcgtagccatgacgataaaactcggcctcggcgtcaatcacctggctcggtttctgcgcactggcggcgctgtcgagataagccagcggcaaaccgtttacctcacggctaagcaccggaaagtcggcccgcactttgtcgacggaaaaaatcatcttgcacctcctggcagccgttgaccgattcgggccagcacctgctgtttaagcccctcatcacgcagtgcttccgtcagttcggcagcgaaggcgtaaatgatcatctgctgggcatcctgctgattgatcccgcggctgcgcagatagaatatctgttcatcatcaatacgccccaccgtcgcgccgtggctgcatttcacatcatctgcatagatttccagctgcggtttcgtatccacttccgccagtttgcccatcagcagattgttgttggtcatctgaccatccgttttgatggcgtgctgcgcgacgttgatcaaaccgttaaataccgcgcggcctttgtcgctgacgatagttttgtgcaactgtcggctgttacaaaaacctttattgtgttccagccaggtacgggtatcacacacctcgtttttcaccggcatcgccaggctattgatccgcagcgtgctgttttcgccattgagttgcgtactggtgttgtgtcgtaacactgcgccacccagcaggaaactgtggctaaatgcggtggcatcctcagccagcaacaaatcgttatgagcaaagtggtgactgagcgggttttcaaacgccagcttgatatgctgcaagtgggcattcgctgcgacgttgatagtgaaccgtgccccggtaaaatgacgagcatcattcaggctgacaaaatgttcgatcaccgttgcttcggcaccttccgccagatccagatgatgtcggtaatgggcagtgttcacctcttcacctgccacgccctgggtgatatgcattaacagcaatggctttgccggccgttgaccgcgcttcacggcgatatgcgtcacgctttgtgccaggctttccgtcaaatgcagaaacacttccgcctgaatagcgtcgggtaaaccctgacggtcgtcgttaatgctcacttcatatccgctgccttcagttgcatcgctcagtgcgggcacgtaacgcccatcgacaaacaccagccgcacggagtctaacgttaacgctaaggcatcacgctgctgtggggatatctctcccgcaatgctgacaaactggctattgatcagcccttccagcggcgtatatttccagttttcatgtttacgtgtcggcagtccggtacgcagcaattgttgtaaatgctgctgtgcttgcggggagcgttttgtcccttcagcttcaaacaagtgatgccactgttgcagcgcgttactgctgttcggtaagccagccataaccctgctcctccagttgtttgaccaacgtgaaatcgccggatttcacaattcgtccctgatatagcacatgaacgtaatcaggcttgatgtagtcgagaatgcgttggtagtgcgtaacaatgatgaaactgcgcttgccatcacgcaggctgttcacgccatcggcgaccacttttaatgcgtcaatatccagcccggagtcgctctcatcaagaatgcataactccggttccagcaccgccatttgcaaaatatcgttgcgctttttctcgccgccggaaaaaccaacgtttacgctacgggttaataaatcttccggcatcttcaggagagcgattttctcttccatcaaatcctgaaaatcaaagcggtcgagcgtttcctggccgcgatagctgcgcaccgcattaagtgccgtttgcaggaaaaactggttactgacacctggaatctccaccggatactggaaggccataaagatgccttcgcccgcgcgatcttccgggctcagcgcaagcaaatctttgcctttgaactcaaccgtgccgcccgtcacttcataatcttctcgcccggcaagcgttgcgcttaaggtacttttgccgctaccgtttggccccataatggcgtgaacttcgccgggatgaacgtcgaggcttaatccgcgcaggatagctttatcttccacgctgacgtgtaaatctttaatacttaacatgtttattccttatccgacgctgtgttcaagactgatggcgaggagtttttgtgcttcaacggcaaattccaacggcagctcgctgaacacgtctttgcagaaaccgttaacaatcatgctgatggcgtcttcttcgctgatcccgcgttgcaggcagtaaaacagttgatcttcaccaatacgacttgtcgttgcctcgtgttccagttgcgcactattgttacgacactcaacatacgggaaggtatgcgccccacaattagcgccaatcagcatactgtcgcactgagtgaaattgcgcgcattggttgccgtcggcatgattttcactaagccgcgataactgttctgactatgtccggcagagatccctttgctgataatggtgcttttggtgtttttaccgatgtggatcatcttggtgccggtatccgcttgctgatgaccgctggtcagcgccacactgtaaaactcaccaatggagttatcgccgcgcaaaatgcagctgggatatttccacgtaatcgcactcccggtttcactttgcgtccaactcattttgctgttttcgccttcgcacaaagcacgcttggtgacgaagttgagaataccgccggtgttgttatcgccaggaaaccagttttgtaccgtggaatatttcacctcggcgtttttatggatgatgacttccaccactgccgcgtgtaactgatagctgtcacgcaccggagcggaacagccttcaatgtagctgacgtagctgtcttcgtcggccaccagaatggtgcgctcaaactgcccggttttttctgcgttaatgcgaaaataggtggaaagttccatcgggcagcgcacgcctttaggcacataaataaacgtaccatcagaggctaccgccgcattaagcgcggcaaagaagttgtcattccccggcaccacggtgccgagatatttacgcaccagttccgggtgatcgtggatcgcctcaccaaaggaacagaaaataattccctgctccgccagtttttcgcgataagtagtggcaacgctaacactgtcgaaaatggcatccaccgccacctctttgccttcccgcacgggaacgcccaactgctcaaacgccgcctccacctctttacttaaaaaggcgttcgcgccagtttgctgcaccgcgccaggttcagacgcgcaagtgtcgtcacaattaccgcagcttggtgcactgtagtagctgtaatcctgataattcagcttgtcgtagtgcgctttcaaccagtgcggttcttccatctccagccatgcgcgataggcgtttagacgaaactccagcatccactccggctcattacgcttcgcgctaattgcgcgcaccacctcttcgtttatcccctttgccagctcatcggtggctaactgggtgaagaatccttctttataattcagcgggccgccggtccaggttttgacatcgtcagttgcttcagtattacgagacatagtaccgcttataccccaaagctttcgccacagccacattcattctgggctttagggttgtgaaatttgaatatctgattaagtccttcacgaacgaaatcgacttccgtgccatcaataaacggcatcgcttgcagcgggacaaacagcttcgcgccgtcgtgttcaaacagcagatcgtctttgtccggctcgctaacactgtcgagcacatagccaaagcccgcgcagcccgtttgcttcacgcctaagcgcacgccgaccatacccggctgctttgccaccagctcacggatgtgtatcgccgctgcgggtgtcagcgttaagccttgccaggcgaaatcttgtgggttaaaggttccactatgcatgtccatcgatttacctcacttcatcgctttcagcgtataacagcatgttagtgataatgattatcagttcaacccagcaaacgcaggggctttaccgtaaaacatgctttttgcctgcttttaataagcatagaccctgatgtgtgggttaacaggcacgctaagaattaggtatctcattgttagataatggttattatctaaggagcattaaggctgtgatgaaaaagaaaaagttgtattgaaaatgactatttaagagataggtaaaaaagtgcagcgttcagaaataagaaaacccttaagtctgtgcgacacaggcttaagggtttctaccccatccggcgcttatctccggcactctcagtggcttagctcttgaaggggcgataagaataatctcataaagctaacccgccgttttaacacaaactgcgattagtattatttttgaacaatatcaggcggtagataagcagtattaagaaggtcatcgaacctggacggaggttaatccaggtcgatttggcgaacttgcggcattaagtcaggatcaatgcacgcccagacgccaggcaaagtagatttcttcttttaattcagcagaagagagagtaagcaggtcagcaaattcaagttctagttgtttcagacgtttgagatattgggcaggactaagattgctctggtcacggcgtaaaaattcaatggccagctgggtgggatcaagttgagtagacatagcatcctcgcttttagacaagacctgcacagtataccaccgtttactgtgcagataatgaccaaaagcaatatgcgtcacacttttctggtgacaacgtcacaaaatggcggtcgtcaatcgactgctacagcacaaacgccctttctcatcgaagatttcaatctgccagacctggtgacggctaccgagatgcaacggtttgcatacgccgcgcacccgcccttctcgtgcgctgcggacgtggttagcattgatttccagaccaaccactttttgctcaccttcggtacataaataaccggcaacggaaccgatactttcggccagtaccacggatgctcctccatgcagcaacccgaaaggctgctttgtccggctgtctactggcattgtcgcttcaagggtgtcatcaccaatatgttcaaagcgaatatccaggaaccccaccatgtttccttcacccatagcattcagtgcttccagggtgattttccgtttccatatcatttaataatctccagtaaagcctgcacaggatggcgtacccccgtgccttcaacccgttttacctggctacggcaggaatatccggtcgccagacagcggttacgcggcagtcgctgcatagcctgatgccaggataactcatagatcccgaggctattttcatggtttttcgcttcatgtccgtaagtccctgccatgccgcagcaacccacgctgacattttccagtttcgcgccaaaacgggcaaatatcgcggcccattgtgctggcgcacccggcaaggcggtaacttcggtacagtgaccaaagaaataccaactttcaccgctgactgtagccactggctgactctcaagtgcgcttgccagccattcattcgccagtaagacgttaaactcgccacgctcctcgcccagcgccagtttatattcatcgcgataacaaagtaccagcgccggatcgacgcccaccattggcatacccagcttcgccatacggttgaggaaatccgccgtctttttcgccgtcttcgcaaaacgattaagaaaacctttaatatgctgggctttgccatttgggctaaatggcagtaacacaggctggaaacctaatttttcgaccagacggacaaaatccgccaccacttgcgcatcgtaatagctggtaaaggggtcctgcaccaccaacactgtgcgcgctttctgctctgcattgagagattcaagctgttccagcgtcatgtttgcgctgcgatgccccaccatttgttgttgtaggctggggacgctcagcagcggcaaatcaaccatgccgatatgtttttcgctgagtttgcgcaccagcggctggttaatgaagaagttaaaggttttcggcgcgcgtgccatcagcggcgcgtagctctcgaccgtagcgacgaggtggtcgcgcagcgggcgtaaataacgggtgtgatagagctgcagaaaacgagagcgaaactccggcacatcaattttgatggggcactgggtgctacacgctttacaggccagacagccgctcatcgcctctttgacttcgtgactgaagtcatattcgcctttattcgcatgccagctattgcgcgtgcgggcaattaacgtccgcaaactgacgccggattcaggcagttcttgttccagtttgagtggatcaacgccgcgatccgccaacaaacgcagccattcacgcaccagcgttgcgcgccctttcggactatgaatccggttctgggtgatcttcatgctcggacacatcggactacgggcatcaaagttgaagcataaaccgttgccgttacactccatcgcaccgcgccactgctggcgtaccgcaatggggatctgccgatcgaatgtaccgcgcttcaccgcgtccactttcatcatcggcgcatcgagaccttctggcgggcaaatcttccctgggttgagtcggttatgcgggtcaaatgccgctttcactttgcgcagttctgcaaaaagttcctcaccgaaaaacgccgggctgtattcagcgcgaaaacctttgccgtgctcgccccacaacaaaccaccgtatttcgcagtcagcgccaccacgtcatcagagatttgcttcatcaaaatctcttgttgaggatcgcacatatccagcgctggacggacgtgcaagacacctgcgtcgacgtgaccgaacataccgtagcttaagccgtggctgtcgagcagcgcgcgaaattcagcaatataatccgccaggtgttccggcggtacgcaggtatcctcagcaaacggaattggcttagcggcacctttggcattgccaagcagaccaacggcttttttgcgcattgcatagatacgttcaacccccgccagctcacggcacacctgccagccgatgacacctgcttgatgactggcgatcagctcatccaaccgcgcacagagtgcatttacccgctcatcaatcagcgcctcatcatcaccagcaaattccacaatgttcagcccgagcatctcttggtcaggcacatcggtaatcaactcgctgacggaatgccagacaatatcttcccgcgccagattcagcactttactgtccaccgtctctacgctaagcgcccgcgcctcaaccataaacggcgcgttacgcagcgcagagtcaaaagagtcatatttgacgttcaccagacggcgcactttaggcaagcgtgtaatatccagccgcgcttcggtaataaaggccagcgtcccttcactacccgtcagaatgcgcgtcaggtcgaactcggtcatctcatcgttaaagacatgacgcagatcgtaaccggtaagaaagcggttaagtttggggaagttgtcgataattaactggcgttgctgacggcaacgttgataaaccgtgttataaattcgcccgattgtggtattggatttacccagcgtttccgccaattcgacgggtaaaggttgcgtatcgagaatatcgccccccaacaacaccgcgcgtacgccaagtacgtgatcactcgttttgccatagaccaggcttccctgaccggatgcatcggtattgatcatcccaccgagcgttgcccggttgctggtgctaagttccggcgcaaaaaagtagccgaacggtttcaggtactgattgagttgatcttttatcaccccggcctcaacgcgcacccagccctcttcagggttaatttcgatgatgcggttcatatggcgggacatatcaacaataatcccctggttgagcgcctgaccgttagtgccggtgccgccgccgcggggggtaaagatcaggctactatagcgttcctgcgcggcaagacgggcgatcagcgccacatctgcggtactacgcggaaataccaccgcatcggggagaagttggtaaatactgttgtcggtgctcattgtcagacgatcggcataacttgtcgccgtatcgccggtaaaaccttgttgctccagctcttgcaaaaaattaagcaccagttgaacgacgccgggtgcctgggaaatctgtggaatcattatattgaccctttcctgcggtctgtgatgtaggtcgatacactattctttcaggctgctgcaatagcgcactgaaaggtgatgtttgtttactctatggatttcgtgttgcaggaaggcggcaagcgagtgaactccaggagcttacaatagtaagtgactggggtgaacgaacgtagccgcagcacatgcaacttgaaatacgacgagtaaatcgtttgcgtgttgcctgagttgttgtaccacatttttttctaacacgcccatcagaattaagggcagaatcggcctgttaaaaaccgctgaaattgctcatcattatgcaggtgagtttcgcgtgttcacgtcgcgtcgacgatttgacgcacaaaaaaggtgaaaagtagttatggtaaatgttcgtcagcccagggatgtcgcacaaattctgcttagcgtgctgtttttagccatcatgattgtggcatgtctgtggattgttcaaccctttattctcggctttgcatgggccggtacggtggttatcgccacctggccggtattgttacgtttgcaaaagatcatgtttggccgccgctctctcgccgttctggtgatgacgctgttattagtgatggtgtttatcatccctattgctttgctggttaacagtatcgtcgacggcagcggcccgctaattaaagccatttccagcggtgacatgacgttacccgatctggcgtggcttaataccattccggtgattggcgcgaagctgtatgcaggctggcacaacttgctggatatgggggggacggcgatcatggcgaaagtccgcccttatattggcaccaccaccacctggttcgttgggcaggcggcgcatatcgggcgctttatggtgcattgtgcgctgatgcttctcttcagtgccctgctgtactggcgcggtgaacaggtggcacaaggcattcgccattttgcaacccgtctggcaggcgttcgcggagatgccgccgtgctgctggcggcacaggctatccgcgcggtggcgctgggtgtggtggtgacggcgttagtacaggcagtgcttggcggtatcggcctcgccgtatccggcgtaccttatgcaacgttgctaacggtgttaatgatcctctcctgccttgtccagcttggcccgttgccggtactgattccggcgattatctggctctactggactggcgataccacctggggaacggtattgttagtgtggagcggtgtggttggcacgctggataacgtcatccgcccaatgttaattcgcatgggtgccgatttaccgctgatcctgattctctctggcgttattggtggtttgattgctttcgggatgatcggtctgtttattggtccggttctgttagccgtttcctggcgtctgtttgccgcgtgggtggaagaagtcccgccgccgacggaccaaccggaagaaattctcgaagaacttggcgaaatcgagaaaccgaataagtaatttctcatcaggcggctctgccgcctgattgttaaccaccgctaattgatatttgcttgctcttccccatattttcctgcttaccgccattcagctggtagtacctgtcgcaaattctttacagtttttaaactaatgagacgaatctgatcgacgcaaaaagtccgtatgcctactattagctcacggttataaatcaacatattgatttataagcatggaaatcccctgagtgaaacaacgaattgctgtgtgtagtctttgcccatctcccacgatgggcttttttttaacatttttccgcttcgctacctcgcccctcactctttccaataatgttgcacaagatactgtgactctcttcaagccgtcagcaggctgataatgttatttatattttattgtttatttcatgcagccattacacgatgaacgcttatgaactccaggcactccgccatatttttgccatgactattgatgaatgcgcgacctggattgcccagaccggtgacagtgaaagctggcgtcagtgggaaaatggcaagtgtgccattcctgatcgtgtagtcgagcaactgttggctatgcgtcagcaaagaaaaaaacatcttcatgccatcatagagaaaataaataaccgcatcggcaacaacaccatgcgttttttccccgacttaaccgcatttcaacgagtctaccctgatggcaattttattgactggaagatctatcaaagcgtagctgctgaattatatgcacacgatctggagcggctttgttaatttttccacagaaaggaattgtcgttgttacaacaataatgaacggatgctgacacaacatcgcttcactttttaaagcacctttgctaagtagaacctatgaaaaatccctatttccctaccgcacttgggttgtattttaattacctggtgcatggtatgggcgtccttttgatgagcctgaatatggccagcctggagacactttggcagactaatgccgcgggtgtcagcatagttatcagtagcctgggcattggtcgattaagtgtcttgctttttgcaggattattatccgatcgctttggtcgccgcccttttatcatgctcgggatgtgctgctatatggccttcttttttggcatcctgcagaccaataacatcattatcgcttatgtttttggctttctggcgggaatggcaaacagttttctcgatgcaggcacttatcccagtttgatggaagcttttccacgcagtcctgggacagccaatattttaattaaagcatttgtttccagcggacaatttttattaccgctaatcattagcctgttagtgtgggctgaactgtggttcggttggtcctttatgattgctgcaggcattatgtttattaacgctctgtttttataccgttgtacgttcccaccccatccgggtcgtcgcttacctgtcataaagaaaaccaccagctctacggaacatcgctgtagtattatcgatttagccagttataccttatatggctatatcagtatggcaacgttttatctggttagccagtggctggcacagtacggacaatttgttgcaggcatgagttacactatgagcatcaaactactcagtatctacaccgtgggtagcctgctttgtgtatttattaccgctccactcattcgtaataccgttcgcccaacaacattactgatgctgtacacctttatcagttttattgctctgtttaccgtctgcctgcatcccacattttatgtggtgataatatttgcttttgtcattggttttacctctgctggaggtgttgtgcaaattggcctgacgttaatggctgaacgtttcccttacgctaaaggtaaagctacagggatctattacagtgcgggcagtattgcgacctttactattccgttgattacggctcatctgtcccaaagaagtattgccgatattatgtggttcgataccgccatcgctgccatcggttttttactggcactgtttatcggcttacgcagccgcaaaaaaacgcggcatcacagcctaaaggaaaatgtcgctccgggtgggtaatgcaatattcttttcaggtcatgcaagatcttacggataaataactctttctgcgctaactaaggaaaatcgcgatcaaaaacaaactatgacatgcaatattcctggaaacataaactttatgccatgtacccagggaaaatcatcttcagtatagtaattatgtaaaccgtcggagaacaatacgtacggtaacgaaattatctttcagcaaggagctgtgaaaatgtctcaaaataaggctttcagcacgccatttatcctggctgttctttgtatttacttcagctacttcctgcacggcattagtgttattacgcttgcccaaaatatgagttctctggcggaaaagttttccactgacaacgcgggcattgcctacttaatttccggtatcggtttggggcgattgatcagtattttattcttcggtgtgatctccgataagtttggtcgtcgggcggtgatattaatggcagtaataatgtatctgctattcttctttggtattcccgcttgcccgaatttaactctcgcctacggtctggcagtgtgcgtaggtatcgctaacagtgcgctggatacgggtggctaccccgcgctcatggaatgctttccgaaagcctctggtagcgcggtcatactggttaaagcgatggtgagttttgggcaaatgttctacccaatgctggtgagctatatgttgctcaataatatctggtacggctatgggctgattattccgggtattctatttgtactgatcacgctgatgctgttgaaaagcaaattccccagccagttggtgggcgccagcgtaactaatgaattaccgcaaatgaacagcaaaccgttagtctggctggaaggtgttagtagcgtactgttcggtgtagccgcattcagcaccttttatgtgattgtggtgtggatgcccaaatatgcgatggcttttgctggtatgagtgaagctgaggcattaaaaaccatctcttattacagtatgggcagcttggtctgtgtctttatttttgccgcactactgaaaaaaatggtccggcccatctgggctaatgtatttaactctgcactggcaacaataacagcagccattatctacctgtacccttctccactggtgtgcaatgccggagcctttgttatcggtttcagtgcagctggcggcattttacagctcggcgttagcgtcatgagtgagttttttcccaaaagcaaagccaaagtcaccagtatttatatgatgatgggtggactggctaactttgttattccactgattaccggttatctgagcaacatcggcctgcaatatatcattgttctcgattttactttcgcgctgctggccctgattaccgcaattattgtttttatccgctattaccgcgttttcattattcctgaaaatgatgtgcggtttggcgagcgtaaattttgcacccggttaaacacaattaagcatagaggttaaaggagttaattatggatgttaccgcaaaatacgaattgattgggttgatggcctatcctatccgccacagtttaagccccgaaatgcagaataaagccttagaaaaagcgggattgccatttacctatatggccttcgaagtggataacgatagctttcctggagcaattgaaggattaaaagccctcaaaatgcgcggaactggtgtaagcatgccgaacaaacaactggcgtgtgaatatgttgatgaattaacaccagctgccaaactggtgggggccatcaacaccatcgttaatgatgatggctatctgcgtggctataacaccgacggcacgggccatattcgcgccattaaagagagcggttttgatatcaaaggcaaaacgatggtgctgttaggggccggtggtgccagtacggcaattggcgcgcagggggcaattgaaggtttaaaagaaattaaactctttaaccgtcgggatgagttcttcgataaagccctcgccttcgcgcagcgggttaatgaaaacaccgattgtgtcgtcacggtcaccgatctcgccgatcagcaagcctttgctgaagccctggcttccgccgacattttaaccaatggcacaaaagtgggtatgaaaccccttgagaatgaaagtttggttaatgatatcagtctgttacatccgggacttctggtcactgaatgcgtgtataacccgcatatgacgaagttattgcagcaggcgcaacaagctggttgcaaaacgattgatggatacggcatgttgttgtggcaaggggctgaacagttcacattatggactggcaaagatttccctctggaatatgttaaacaggtcatggggttcggtgcctgacaggctgaccgcgtgcagaaagggtaaaaaatgaaaaccgtaactgtaaaagatctcgtcattggtacgggcgcacctaaaatcatcgtcagcctgatggcgaaagatatcgccagcgtgaaatccgaagctctcgcctatcgtgaagcggactttgatattctggaatggcgtgtggaccactatgccgacctctccaatgtggagtctgtcatggcggcagcaaaaattctccgtgagaccatgccagaaaaaccgctgctgtttaccttccgcagtgccaaagaaggcggcgagcaggcgatttccaccgaggcttatattgcactcaatcgtgcagccatcgacagcggcctggttgatatgatcgatctggagttatttaccggtgatgatcaggttaaagaaaccgtcgcctacgcccacgcgcatgatgtgaaagtagtcatgtccaaccatgacttccataaaacgccggaagccgaagaaatcattgcccgtctgcgcaaaatgcaatccttcgacgccgatattcctaagattgcgctgatgccgcaaagtaccagcgatgtgctgacgttgcttgccgcgaccctggagatgcaggagcagtatgccgatcgtccaattatcacgatgagcatggcaaaaactggcgtaatttctcgtctggctggtgaagtatttggcagcgcggcaacttttggtgcggtaaaaaaagcgtctgcgccagggcaaatcagcgtaaatgatttgcgcacggtattaactattttacaccaggcataagcaataatatttcggcgggaacaccctccccgccgaactaaaaaatatattcaatcgtatttaataaaaatatttcgtgagtctctgtgcgctaattctccatttggcgtagggaaaatcacatctgaatcaggaattaacaatgaaacctgtaaaaccacctcgtattaatggacgagtgccggtcctgagcgcacaggaagcggtgaattatattcccgacgaagcaacactttgtgtgttaggcgctggcggcggtattctggaagccaccacgttaattactgctcttgctgataaatataaacagactcaaacaccacgtaatttaagcattattagtccaacagggcttggcgatcgcgccgaccgtggtattagtcctctggcgcaagaaggtctggtgaaatgggcattatgtggtcactggggacaaagcccgcgtatttctgaactcgcagaacaaaataaaattattgcttataactacccacaaggtgtacttacacaaaccttacgcgccgccgcagcccaccagcctggtattattagtgatattggcatcgggacatttgtcgatccacgccagcaaggcggcaaactgaatgaagtcactaaagaagacctgattaaactggtcgagtttgataacaaagaatatctctattacaaagcgattgcgccagatattgccttcattcgcgctaccacctgcgacagtgaaggctacgccacttttgaagatgaggtgatgtatctcgacgcattggttattgcccaggcggtgcacaataacggcggtattgtgatgatgcaggtgcagaaaatggttaagaaagccacgctgcatcctaaatctgtccgtattccgggttatctggtggatattgtggtggtcgatccggatcaaacccaactgtatggcggtgcaccggttaaccgctttatttctggtgacttcacccttgatgacagtaccaaacttagcctgcccctaaaccaacgtaaattagttgcgcggcgcgcattattcgaaatgcgtaaaggcgcggtggggaatgtcggcgtcggtattgctgacggcattggcctggtcgcccgagaagaaggttgtgctgatgactttattctgacggtagaaacaggtccgattggcggaattactagtcaggggatcgcctttggcgcgaacgtgaatacccgtgccattctggatatgacgtcccagtttgatttttatcacggtggcggtctggatgtttgttatttgagttttgctgaagtcgaccagcacggtaacgtcggcgtgcataaattcaatggtaaaatcatgggcaccggtggatttattgatatcagtgccactagcaagaaaatcattttctgcggcacattaactgcgggcagtttaaaaacagaaattaccgacggcaaattaaatatcgtccaggaaggacgggtgaagaaatttattcgggaactaccggaaattactttcagcggaaaaatcgctctcgagcgagggctggatgttcgttatatcactgagcgcgcagtattcacgctgaaagaagacggcctgcatttaatcgaaatcgcccctggcgtcgatttacaaaaagatattctcgacaaaatggatttcaccccagtgattagcccagaactcaaactgatggacgaaagattatttatcgatgcggcgatgggttttgtcctgcctgaagcggctcattaacaggagtataatgatggatttttctttaactgaagaacaagaactgctgctggccagtattcgcgaactgattacgactaactttccggaagagtatttccgcacctgcgatcaaaacgggacatatccgcgtgagtttatgcgggcgctggcggataacggtatttccatgcttggcgtgccggaagaatttggtggtatccctgcggattacgtcacccaaatgctggcgctgatggaagtgagtaaatgcggtgctccggcatttttaattaccaacggtcaatgtattcacagtatgcgccgtttcggttctgcagagcagctacgtaaaacggcagagagcaccctggaaacgggtgatcccgcctatgccctggcgttgacggaaccaggtgctggcagtgataacaacagtgccactaccacttacacgcgtaaaaacggcaaggtctacatcaacggacaaaaaacctttattaccggtgcgaaagagtacccgtatatgctggtgctggcgcgcgatccgcaaccgaaagatcccaaaaaagccttcaccctgtggtgggtcgactccagtaagcccggcattaagattaacccgctgcataaaatcggctggcatatgctcagcacctgcgaagtctatctcgacaacgtggaggttgaagagagcgacatggtgggcgaagaaggaatgggtttcctcaatgtgatgtacaactttgagatggagcgcctgatcaacgccgcgcgcagcaccggctttgccgaatgcgcctttgaagatgccgcccgctatgccaaccaacgtatcgcttttggtaagcccattggtcataaccagatgatccaggaaaaactggcgctgatggcgattaagatcgacaacatgcgcaacatggtgctgaaagtggcatggcaagccgatcagcatcagagtctgcgcaccagcgcggcgctggcaaaactgtactgtgcacgtaccgcaatggaagtcattgatgatgcgattcaaatcatgggcggtctgggctataccgatgaggcgcgcgtctcccgcttctggcgtgatgtccgttgtgaacgtatcggcggcggtacagacgaaattatgatttacgtagcaggtcggcagatcctgaaagactatcagaacaaataatctgcaggcggcgcagcttcttaacaaactgcgccgccagatttatccaacaagacttaccggttgaggaaattcagataggatttcttgttccgcaaaacagtttttaaattgtctacggtaatcgctggggctacaaccgacatggcgcaaaaacagtttggcaaagtgatcgacattttcataacccacacgccaggagatctctgcctgacttaattcagtattagtgagactccattttgcttccgtcatacgccgttgaataacatagttaataggggaaatacgatactctttggtaaattcatggcaaatataactgacgctggcacgaaattttttgcttaactgttctaaagtgattttttcgcgataattattattcagatagaaaagaatatcttttatcagaacatcttttttaatatacccctgctcgctacgataagcatttttaaaattttcgtagtaaagaatggctaacgtataggcaaatgcatcccataagctagatgtttggctatttttactttgcggcaaaatcacacttagctcattaaataaggtttttatgacttcttttccctgccccgcggcaattaccggacaagaatgcggttgcagtagctgattttcctcagccccctgaaactgaaagccgtacagcgcacaggtacacgtcgttgccggatcgttaacgtcagaggccaccgcatgcagcctgccgcgttctatcaccacaatgtcatccgcatgtgcgacatataagctagaatcgatggtaaaccttgcaacccctttcttgacgtaaatcaactcggtttcattgtcatgaacgtgatgtccggactcccattttggatcatcgctaaatgcaaaacgactaagccgtggcgttttaccggcgacaaacagcgtttcactggcgttatcaaaacagcgttgatacatgacaacctccctattccatgagcaagcaaaaacaatatatgccggataaaatacggcgtgtattgcggttatacaaccgcgtttagcgagagctaaacaagattatttacactgaatgcaagattgtacggtcatggaataactatattgccgcaaattgcacttttgttttagcgatcgcattttttttgcaagattgttggcaaggaaaacagcttgctccgtcgaaaaccccgcaccgctatcgcacactattttcaggccatttttaccttccatcggagatggttccgtatgcgactcacaggagaaatcatgaaaataataacctgctttaagctggtgcctgaagaacaggacattgttgtcactccagaatacaccctgaatttcgacaatgccgacgccaaaatcagccagttcgatctcaatgccattgaagctgcaagccagctcgcaacagatgacgatgagatagccgcgctgaccgttggcggcagtttgttgcagaacagcaaagtgcgcaaagacgtgctatcccgcgggccgcacagcctgtatttggtgcaggatgcgcaacttgaacatgcactgcctctcgataccgcaaaagcgctggcggcagcaattgaaaagatcggcttcgatttactgatctttggtgaaggttccggcgacctttatgcccagcaggttggcttgctggtcggagaaattctgcaacttccggtgattaatgcagtgagtgctattcagcgtcagggcaatacactggtgattgaacgcacgcttgaagatgatgttgaagttattgaactctctgttccagccgtgctctgcgtcacctccgatattaacgtgccacgcattcctagcatgaaagccattctcggcgcgggtaaaaaaccggtaaatcagtggcaggcaagtgatattgactggagccagagcgcgccacttgctgaactggtcggcattcgcgtaccgccgcaaacagaacgtaagcacatcattatcgataacgatagcccggaggccattgccgagctggcggaacatctgaagaaagccctgaactgaagcctacggagaagaaacgatgagtcaattaaacagcgtctgggtctttagcgataatcctgaacgttatgctgaactgtttggcggcgctcagcaatggggccaacaggtgtatgccattgtacaaaataccgaccaggcgcaggcagttatgccttatggtccaaaatgtctttatgttcttgcgcaaaacgacgcgctgcaacgcactgaaaattacgccgaaagcattgctgccctgctgaaagataaacaccccgctatgttgctgttggccgcgacgaaacgtggtaaagcgctggcagcacggttaagtgtgcaactgaatgcggcgctggtgaacgatgccacggcggtggatattgtcgatggtcacatttgcgccgaacaccggatgtatggcgggttagcgttcgctcaggaaaagatcaacagcccgctggcgatcattacccttgcacccggtgttcaggaaccgtgcaccagtgatacctctcatcagtgcccgacagaaacggtaccttatgttgctccgcgtcatgaaattctctgtcgcgaacgccgtgcgaaagccgcaagcagcgtggacctgagcaaagcaaaacgtgtggttggcgtcggtcgtggactggcggcgcaggatgacctaaaaatggtccacgaactggcggcggtgctgaatgctgaagtcggctgtagtcgtccaattgccgaaggcgagaactggatggagcgtgaacgttatatcggtgtctccggcgtgttgctgaaatccgatctctacctgacgctggggatctccgggcagatccagcatatggttggcggcaacggcgcaaaagtgattgtcgccatcaataaagataaaaatgcgccaatcttcaactatgccgactacggtctggtgggcgatatctacaaagtcgtccctgccctgattagccagttgagccgctaattcccctttcaaccacatctcccgctgtaaacgcagcgggaagggagcataacgcatgagcgatgacaaatttgatgccattgtggtcggtgcgggcgttgctggtagcgttgccgcactggtcatggcacgagccgggctggatgtcctggtgatagaacgcggcgacagtgccggatgtaaaaacatgaccggcgggcgtctttatgcccacacacttgaagcaatcattccaggctttgcagtaagtgcgccggtagaacgcaaggtcacacgcgagaaaatctccttcttaaccgaagaaagcgccgttaccctcgattttcaccgcgagcagccagatgttccgcaacacgcatcttataccgtattgcgtaatcgtctggacccgtggttgatggaacaagccgagcaggcgggcgcgcagtttatcccaggcgttcgcgtcgacgcgctggttcgtgaaggaaacaaggtcactggcgtgcaggctggggatgatattctcgaagcgaatgtggtgattctggctgatggcgttaacagcatgcttggccgcagcctgggaatggttcccgcttccgatccgcatcattacgctgttggtgttaaagaggttattggcctcacaccagaacagatcaacgatcgctttaatattacgggcgaggaaggtgccgcctggctgtttgccggttccccttctgacggcctgatgggcgggggatttctctataccaacaaggattccatatccttggggctggtttgtggattgggtgatatcgcccatgcgcaaaaaagcgtgccgcaaatgctggaagattttaaacaacaccccgccattcgcccgctgattagcggcggcaaactgcttgaatattccgcgcatatggtgccggaaggcggtctggcaatggtgccgcaactggttaacgagggcgtgatgatcgttggtgacgccgcaggcttctgcctgaatttgggttttacggtccgcggcatggatttagccattgcaagcgctcaggctgccgccacaacggtgatcgccgccaaagaacgcgcggatttctccgccagcagtctggcgcaatacaaacgtgagctggaacaaagctgcgtcatgcgtgatatgcagcattttcgcaagatcccggcgctgatggaaaacccgcgcctgtttagccaatacccacgaatggtagccgacatcatgaacgagatgttcaccatcgacggcaaaccaaaccagccggtacgaaaaatgatcatgggacatgcgaagaaaattgggctgatcaacttgctgaaagatggcattaagggagcaaccgcgctatgagccagaacgctacggttaacgtcgacatcaaattaggcgtcaataaattccatgttgatgagggccacccgcatatcattctggcggaaaatcccgatatcaatgaattccataaattaatgaaagcctgccctgccggactttataagcaggatgacgcaggaaacattcattttgattccgccggttgtctggagtgcggcacctgtcgggtgctgtgcggtaacactattctcgaacagtggcaatatcccgcaggcaccttcggtattgattttcgctacggctaatcatgcatcccacaggcccgcatctcgggcctgatgttctgtttcgagagtccaacatgaaagtgacattaacgtttaacgaacaacgtcgtgcggcgtatcgtcagcaagggttatggggcgatgctagcctggccgattactggcagcagaccgctcgtgcgatgccagacaaaattgccgtggtcgataatcatggtgcaagctacacctatagcgcgctcgatcacgccgcgagctgtctggcaaactggatgttagcgaagggtattgaaagtggcgatcgcatcgcatttcaactgcctggctggtgtgaatttaccgttatctatcttgcctgcctgaaaatcggtgcagtttccgtgccgctgttgccttcctggcgggaagcagaactggtgtgggtgctcaataagtgtcaggcaaaaatgttctttgcaccgacgttgtttaaacaaacgcgtccggtagatttaatcctgccgctgcaaaatcagcttccacaactacaacaaattgtcggcgtggacaaactggctcccgccacctcttccctcagtttaagtcagattatcgccgacaataccagtctgaccacggcgataacgacccacggcgatgaattagctgcggtgctgtttacctccggaaccgagggtctgccaaagggcgtgatgctaacgcataacaatattctcgccagtgagcgggcttattgcgcgcgactgaatctgacctggcaggatgtctttatgatgcctgcgccacttggtcacgcaacgggctttctgcatggcgtaacggcaccattcttaattggcgctcgcagcgtgttgttagatattttcactcctgatgcgtgtctcgcgctgcttgagcagcagcgttgcacctgtatgctcggcgcaacgccgtttgtctatgatcttttgaatgtactagagaaacaacccgcggaccttagtgcgctgcgtttctttctttgcggcggaaccacaatccccaaaaaagtggcgcgtgaatgccagcagcgcggcattaaattattaagtgtttatggttccacagaaagtagcccgcatgcggtggtgaatctcgatgatcctttgagccgctttatgcacaccgatggttacgctgccgcaggtgtagagattaaagtggtcgatgacgcacgcaagaccttaccgccaggttgcgaaggtgaagaagccagccgtggccccaatgtgtttatggggtattttgatgaacctgaattaaccgcccgtgccctggatgaagaaggctggtattacagcggcgatctctgccgtatggatgaggctggctatataaaaattaccggacgcaaaaaagatattattgtccgcggcggcgaaaatattagcagccgtgaagtggaagatattttattgcagcatcctaaaattcacgatgcctgtgtggttgcaatgtccgatgaacgtttaggtgaacgaagttgcgcttatgtcgtgctgaaagcgccgcatcatagtttaagcctggaagaggtagtggctttttttagccgtaaacgggtcgcaaaatataaatatcctgaacatatcgtggtaatcgaaaaactaccgcgaactaccagtggtaaaatacaaaagtttttgttaagaaaagatattatgcggcgtttaacgcaggatgtctgtgaagagattgaataagtttcatcttcggggatcacataaccccggcgactaaacgccgccggggatttattttatttcttcagttcagccaggcttaaccaggtttgcaccacggtgtccgggttcagagacaggctatcgatcccctcttccatcaaccatgcggcaaagtcttcgtggtcggacggaccctgaccgcaaatcccgacatatttgccctgtttcttcgcggcacggatagccatgctcagcagtgctttcaccgcatcgttgcgctcatcgaacaattcagacaccacgccggagtcacggtccagaccgagcgccagctgcgtcatatcgttactgccaatactgaagccgtcgaaatattcgaggaactgctcggccagcaaggcgttggacgggatttcacacatcatgatgattttcagcccgttctcgccacgtttcagcccctgacgcgccagttcttcaaccaccgctttcgcctgatctacggtacgcacgaacgggatcatgatctcaacgttggtcagtcccatgtcgttgcgcacacgtttcactgcttcacactccagcgcgaaacagtcgcggaagctgtcggaaacatagcggcccgcgccacggaagccgagcatcgggttctcttcatctggctcgtaacgctcaccaccgaccaggttggcatattcgttgcttttaaaatcagagagacggacaatgacgcgcttcggataaaacgcggcacccagcgtcgcgatcccttcagtcagacgaccaacgtaaaattcacgcggagaatcaaaacctttcatcatctcgcggatttcgttttgcaactgcggttcctgatcgtcaaactcaagcagtgcgcgtgggtggacgccaatcatacggttgatgataaattccagacgcgcaaggcccacgccttcgttcggtaggcaggcgaagtcgaaagcacggtccgggttaccgacgttcatcatcactttcaacggcagatccggcatcgtttctacgctggagcttttcacgctaaattccagcaactccgcatagacgtaaccggtatcaccttcggcacaagaaacagtgacgttctcaccgtctttcatccgttctgttgcatctccacagcccactaccgccggaatgcccagttcacgagcgatgatcgccgcgtgacaggtacgaccgccacggttggtgacgatggcagatgctttcttcatgatcggttcccagtccgggtcggtcatgtcagtaaccagcacgtcgccaggttcgatgcggttcatttcgctgatgtcatggatgactttcaccggacccgcaccgatgcgatgaccgatagcacggccttcggcgataatcttaccctgactatgcagcgtataacgctccatgacctgaccgcgactgcgcacggtttccggacgcgcctgcacaatgaacagtttaccggtgtggccatctttcgcccactcaatatccatcgggcgaccgtagtgtttctcaatttgtacggcctgttttgccagttcctgcacttcttcgttggtcaggctgaagatgtcacgctgttcctgcggtacgtcttcgattttaacctgcttgccgtgctcctgggtcggcgcgtaaaccatgcggatttttttgctccccatggtgcggcgcacgatagccgggcgattcgccgccagtgtcggtttatgcacgtaaaactcatccgggttaaccgcaccctgcacgaccatctcaccaaggccccatgcggaagtgataaacaccacctggtcaaagccggattcggtatcaatggagaacatcacgccagaacttgcgaggtcagagcgcaccatccgttgaacaccggcggagagcgccacaccacggtgatcgtaaccctggtgcacacgataagagatggcgcgatcgttaaacagagaagcaaatacatgtttcactgccacgagaacggcgtcaaaaccctgaacgttgaggaaggtttcctgctgaccggcaaaagaagcgtccggcatatcttctgcggtggcggaggagcgcaccgcaaaagaggcgttttcgtcatcggcggaaagctgtgcataggcttcgcggatggcgttttccagctcaggctggaagggagtgtcgataatccactggcggatttgcgcgcccgctttcgcaagctgagtaacatcgtcaatatccgttttatccagcagttcataaatgcgctggtttacgccgctttggtccagaaactggttaaacgcgtcggcggttgtggcgaaaccattcggaacggaaacacccattccggaaagattagtaatcatttcacccagggaggcatttttgcccccaaccctgtctacatcattcatgccgagttggttataccaaagcaccagcggactgctgccattgttggacatcgaacaatccttttgtgataaatgaacggtttgagaaacacatttctgcgcatttatctttgcatatttaaccggatgaaaaaaacggtgaatcgttcaagcaaatatatttttttactttttaagactgatcccagcgttgcgcaaatctgctctcttcgacaatttccacataaaccatcggtataaacgaaaccataaaaatgaaatgctgttttcataaaaaataaaattgaaggttcattttataaaccagacataacgttctacgcttctgtgcgtttttaatttatgctttcatagaattatgtctgcatcacgggaagaacaaaatggataatgctgttgatcgccacgttttttatatttctgatggtacggcaataactgcggaggtattaggacacgcagtaatgagtcaatttcccgtcactatcagcagcatcacgctgccgtttgtcgaaaatgagagccgtgcacgggcagtgaaggatcagattgacgcaatttatcaccagacaggcgtgcgcccgctggtcttctactccatcgtgttgccggagattcgcgccatcatcttgcaaagtgaaggcttttgccaggatatcgttcaggcgctggttgccccgctacaacaagagatgaaactggatccaacgccgattgctcatcgtacccatggccttaaccctaataatctcaataaatatgatgcgcgcattgcggcgattgattacaccctcgcccacgatgacggcattagcttgcgcaatctggaccaggctcaggtgatcctgctcggtgtttctcgctgtggtaaaacccccaccagtctgtatctggcaatgcagtttggtatccgcgcggcaaactacccctttattgccgacgatatggataatctggtgctacccgcgagcctcaaaccgcttcagcataaattgttcggcctgactatcgacccggaacgtctggcggcgattcgcgaggaacgtcgggagaacagtcgctatgccagccttcgtcagtgcaggatggaagtcgcggaagtggaagccttgtaccgtaaaaatcagatcccgtggattaacagtaccaattatagcgtagaagagattgccaccaagatcctcgatatcatgggccttagtcgccgaatgtactaaagaactagtgcattagcttatttttttgttatcatgctaaccacccggcgaggtgtgacacacctcgcacttgaaatcagcagcgattggtttatcgtgatgcgcatcacttcccggcagtcctgccgtagaagcaacaaatttctgagacttgtaatgaacagaactgacgaactccgtactgcgcgtattgagagcctggtaacgcccgccgaactcgcgctacggtatcccgtaacgcctggcgtcgccacccatgtcaccgactcccgccgcagaattgaaaaaatactgaatggtgaagataagcgactgttggtcattattggcccctgcagcatccacgatctcaccgctgcaatggagtacgccacccgtctgcagagcctgcgcaaccagtaccagagtcggctggaaatcgtaatgcgcacctattttgaaaaaccacgaactgttgtcggctggaaaggactaatctccgatccagatttaaacggcagctatcgggtaaatcacggtctggagctggcgcgcaaattacttttacaggtaaatgagctgggcgtcccaaccgcgaccgagttcctcgatatggtgaccggtcagtttattgctgatttaatcagttggggcgcgattggcgcacgtactaccgaaagtcagatccaccgcgaaatggctagcgcactctcctgtccggtaggttttaaaaatggtaccgatggcaatacgcggattgctgtggatgctatccgcgcagcccgcgccagccatatgttcctcagcccagacaaaaatggtcagatgaccatctatcagaccagcggcaacccgtatggccacattattatgcgtggcggcaaaaaaccgaattatcatgccgatgatatcgccgcagcctgcgatacgctgcacgagtttgatttacctgaacatctggtggtggatttcagccacggtaactgccagaagcagcaccgtcgccagttagaagtttgtgaggatatttgtcagcaaatccgcaatggctctacggcgattgctggaattatggcggaaagtttcctgcgcgaaggaacgcaaaaaatcgtcggcagtcagccgctcacttacggtcaatccattaccgacccgtgtctgggctgggaggataccgaacgcctggtcgaaaaactcgcctctgcggtagatacccgcttctgaatgcgtgcccattcctgacggaatgggcatttctgcgcaacttgttgtcttctcaacaaattactgcttgctctggtcagccataatattgataataagaatcattgttatatcaattattattaatttttatgcgttatacggatagcagaaaactcacgcctgaaacggatgccaatcacaagaccgcttccccgcagcctattcggcgaatttccagccagacactgttaggtccggatggcaaactgattatcgatcatgacgggcaagaatatctgctccgtaaaactcaggctggcaagctgctgttgaccaagtaacctttaactgctgcagctgacttccagccgtttaccccagtcaggtggacgactgacatagtcatcatctctgtcgctgaaaggatttcgcaacgcctcatgcaggcggtgcaattccgtcatatcacccttttctgccgcttcaatcgcccgttgcgccaaccagttgcgcaataccagagcggggttaacgctttgcatcagttgctgacgctcactatcgctaacctcgtcttgttgcaaacgcccccgataacgggcaaaccagtcatcaaatgccgcacgatcaataaactcatcacgtagcggactcgccgcgctgtgctgctcggtcagactcagcatgcggaatgtgcgggtataatcgctgcgctctcgcgccatcagactgaataattcattcagtagcgcgttatcctctttttgctccgtcatgaagcccagtttctgccgcatccgttctccataatgcgtcaacaaaacctgctgatagctgtccagggcctcattcagggcatctacggcaacaaatgggctcaatgtctgcgccagacgctgtaaattccacaacgcgacggcaggttgattatcaaagctgtaacgcccttgatgatcgctgtgattacaaataaaaccgggttcgtaatcatcaagaaaaccaaacggcccgtaatcaagcgtcagccccagcaggctcatgttgtcggtattcatcaccccatgagcaaagccgaccgtctgccattgggcaattaagctcgcggtacgtgcgacaacatcgctaaaccagagacggtatttgtcctcatcatctgcaagatgactccagtaatgacgaatagcaaagtcagctaactgacgaaccttttcgctctcgcggcggtagtaaaaatgttcgaaatgaccaaagcgcagatgacttggtgccacacgcatcagcatcgcgcctggctccgccgtttcccgatacactgggctatcgctggtgacgatacttaacgcgcgggtcgtcggaatgcccagataatgcatcgcctcactggcgagactttctcgtatcgtgctacgtaaaaccgcccgtccatcacccattcggctataaggcgtcaggccagcacctttcagatgccagtccattgtagtgccatcagcaagcagttgttcgccgagtaaaatgccgcgcccatcacccagttggcccgcccagacgccgaactgatgaccactgtaaacctgcgccagtggactcataccaggcagtagggcttcgccgccccagacacctgcgccatttttaaacaggctgcttggaatactcagcgtgttagccagttcggtattatgccaaatcagccgggcattatttaaaggcgtaggggaaagtgctgtataggtttctggcaattcatcgcgccagcgggtaacaaaagacagggtcatagatcctcctgtttgatagtgtagacggttactctcgtcttaaacaccagcaaacagaagggttatcgctgaaccaacgtcgttatctgatttatgggaacggcaggccacaggcatccctggagagcatggaaatcgaagggggtaatctgtgccaatatttctgccgtatcaatgcctcccgcaatgatgcaattgcaacaaggggaaatttgcgcctggatcgcacgaataaacggttcgaaggagcggtgcgtgatttgttgctgaataaaacttttatccagcatgacgcgggtgaaaagaccatcaaaaaccgctttcattgtgctattgcctgctcccaaattacctaacacaaggggatacacttggcttaaggataaaagaccgcgattatcttttccttcattgagatgcgggtaattctcattaatcaacagttcaataaacggatattttaatagttcgcctgcgtaattatccctctctaataataatgtagccacttgtggcgttaaattaagccaggcaaagagtttatgttgaataaaaaaatgttggcaactttttagtaattccaactgctcactaaataattgccaatgttgctcctcggtaagttgcgctataacccgactcgtcgggatacgaaccgtaccatcttcactggagaaatgggtaattaactcaacgccgacaaggacttgctggttgtctcttatcggcaggaaatagcaatcagaatgataaagattctccaaaaaaatcttcatggtaaccgtccctctcgaaggatgtttttcagtatccggctaaaagggatgaggccataagacataacaattacagaaggagtaactttcatttgttccatgttaaccactttttcaggggtcctttttttagattatcctgattataaacgaataatccatttacggaatttttgtctgcaaaatactactgtattcaggagtaaatggacggcgatgtatcatcgccgtccatttttcgacatattagattcgtctcgcctgccagaaatttttctgccaatagacattatcaagactggaacgcatcactcccttgctggtagaggcgtggataaattggttgttggtatcgtaaatacctacatgcaaaccattttgtccggaccccgttttgaaaaagaccaggtcacctggcagcaactcgtctttatcaatttgcgtgccaatagaggcttgttgtttggtttcacggggcagctgcaaatcgaaacgatcgcgcatcgtcacaaccacaaatccgctacagtccacaccgcgccgcgtcatgccaccataacgatacggcgtgccatgccagctttgtagctggtcgttcaaaccggcaataacggtaatgctatcagaaagtctggcatttggcggcggtgctttatggtggctacacccggccagaagcagtgctgtgatcaaaataaggcagaaacgcattccgtacggttcctctgttttttattcttgcattaatttagcgtcgtaattacccgattttcaagatactaatgaaatcagatggtgctaatcagcattctgtgaccttcgatatccagacggcgaaaattcatcccataggcctgcgccagatttggcggcgtgagcacctcttccctgcgtccactggccagcatttttccaccttttagcaaccacgcccgatgcgcatgacgcaatgtgtggttgagatcgtgactgctcatcacaatcgccagtccttgctgacacagcgcgctcagaattttgtctaacgcactttgttgcgcaacatcaagactgttcatcggctcatcaagaagcagcaattggcctgcgggattggcttgtggtgtgatttgcaacaccaccgcagcaagacgtacgcgttgccattcaccgccggaaagttgattggtgctacgtccgagtttgtcatcaagagccagcgcccctgcgacatcattcagtagttcggtacgcgttttatcgtgctgatgcagtgtcaggtagtgccagaccggcgttgcaaacggcggcgtctgctgttgactaagataggcgcgatgcagcgcgagttttgttgcggaccatgcttccagtggttgccccgcgaactgaatgcttcccttaccgctggtcattccggccattcgcgccagtaaggtactcttacccgcgccattcggccccaccaggtgcaggatctccccagcccgaacctcgccagaaagcggccccaggcgggtagattccgcaacatcttgtaactgcatcacaatagacattattttgccaacgccagtttaatgctttccatcacaatgggatcttccggcgtcatatccggggaaaaacgctggatgacttttccgtccctgccaaccaggaatttttcaaaattccataaaatatcatccgggtacagcggtgcacggcctttgctgaccatacgggcatagaatccgctctcttccggcgcgactgcggtcggcgctgcggcaatcaatttttgatacagcggatggcgtccttcgccattaacttcaatcttactgaacatcgggaacgtcaccccccatgtggtggtacagtaagttttaatctcttcatcgctgcccggttcttgttccagaaactggttgcacgggaatcccagcaccataaaacctcgatcgacccaggctttctgaatattctccaactgctcatattgcggcgttaagccacacttactggcgacattgacaatcaacagcacattaccggcgaacttctccagcgtggtcacttcaccgtcgatatctttcactacggtcgtcagaatggaatcttgcatcgtttctcctgggtgtggtcagtaaaaatcttagcttttaatcatagaccgtctttttgcggttaacgtcctgcttttaacaataaccagataaacaccggcgcacctaacgttgcggtgaccacgccaataggcagctctgcggcagctaatgccaggcgcgctacaatatcggccagcagcaatgcgctcgcccctgccagcgcgcagccgggaagtaatacgcgatgatcggttaaaccacacaaccggagaatatgggggatcaccagaccaataaagccgatagcacccgccagcgccacactgacgccaaccatccagccggtcgctgccaccagcacattgcgccagaaccacaggggtaaacccagttgccgcgcgctgatctcgccaagtgctaacatattcatcggcctggactgacaacagatccacaacaacacggggatcaatgccagcatcagccagctttgccgccagtctacgccgccaaaaccgcccatcatccagtacatcagctgacgcaaatcaacactggtggaaaagtagatagcccacgtcattagtgcgctacagataatccctaatgcaacgccagccagcaataaccgactggtgctaagatgacgacgggcgaaacgtaagagtattaaagtgatgataagcgcgccagcaatcgcacacagccctagcgcccagttggggagttgcccttgcccaagcaataccgcggcgataagccccacgcctgcgccgttagagacgccaagtagtccaggttctgccagaggattttcaaacaacgcctgcattacagcgccggatatagccagcgccgcaccaaccagcaatacagccagcgtacgtggcaggcgaatttgccagacgaacagttcgccacgaggagtaaaccagtcacctgggctgatccattgttcaccggcgcaaaggcttaagagaagcgccagcagcatcaaaacactcaggcataataaccagcgaatattttgtcgctgttgttggcgggcaagtgtcagcatggtatccgttctgctgaagtgtcatggcgttgattttacggtgactcttcgacagtgaaaagaaaaaaggccgcagagcggcctttttagttagatcagattactcgtctttggggctagcgttttcgacccggctttttaacttctgcccgggtctgaaggtcaccacgcgccgtgctgtaatgggaatatcctcgcccgttttcgggttacgtcccgggcgttgattcttatcacgcagatcgaagttaccaaaaccagagagtttcacctgttcgccgttttccagagcgcgacggatctcttcgaaaaacagttcaaccagttctttggcatcccgcttgctaagcccaagcttatcaaacagatattcactcatttcagcttttgtaagcgccataggttcaatccctcaaacttgcctggaatcgctcttttaatgcctctacacatttggcgacggtagcggcaatctcctcttcttcgagtgtacggctggtatcttgcaggatcaggcttatggcgaggctcttatacccctccgcaacacccttaccgcggtacacgtcaaataagtttacgccaactacctgatttacgccaactttcttacattcggataaaatatccgctgcgggaacgttttctgcgaccaccaccgcgatgtcacgacggttcgccgggaagcgagaaatctcgcgcgcctgaggcaccacgcggtctgcgagcttgttccactccagttcgaacaccagagtgcgaccgttaagatccagtttacgttccagttcaggatgaacaaccccaacaaaaccaatacgttcacctttcagataaatcgctgcggattgccccggatgcagtgccggattcgcttctgcacggaactcaacctcattcagtttaccggtcaggtcgagaacggattcaagatcgcctttcaaatcatagaaatcaacggtctcttttgccaggttccagtgctcttcgtaacggttaccgcaaatcacaccggctaacatcagatcctgacgaatgcccaacggtgcctgagtatctggtacgaaacgcagaccgctttcgaaaatgcgcacacggttctgctgacggttctggttgtacaccacggttgccagcaggccagtccacagagaaagacgcattgcactcatttcaacagagatcgggcttggcagcagtaaggcttcaacgcctggatggatcatctgctgcactttcggatcaacgaagctgtaggtgatcacttcctgatagcctttgtcgttgagcagcgttttcacgcgcttgaggctcaggtcagcttcacggtgagtacccataatcaggcttgcctgtaccggctcatccgggatgttgttgtagccgtaaacacgcgcgacttcttcaaccagatcttcttcaatctccatatcgaaacgccagctcggcgcaactgcctgccattcgtctttgccttcggtcacttcgcagccgagacgacgcagaatgtcagttacctgctcatccgcaatatgatggccgatcaggcgatccagtttgctacgacgtagagtgatggttgcacgcttcggcagcgttgcttcgttggtgatatcaattaccgggccagcctcaccaccgcagatgtcgatcagcagacgggtcgcacgttccatcgctttgtgctgcagtgccggatcaacgccacgctcataacggtgagacgcatcggtatgcaggccatgacgacgagcacgaccggtgatagacagcgggctaaagaacgcgcattccagcagcacgttttgtgtttcgtcattcacgccagagtgttcgccaccgaagatgccgcccatcgccagcgccttgttgtggtcggcgatgaccagagtgtcagcattcagcttcgcttcagtaccgtcgagcagcaccagcgtttcgccctctttcgccatccgcaccacaatgccgccttcaatgcgatctttatcgaaagcgtgcatcggctggcccagttcgagcagcacatagttggtgacgtcaacaactgcatcgatagaacggatcccgcaacgacgcagtttttctttcatccacagcggagttggcgctttaacgttaatgccttttaccacacggccaagataacgcgggcaggcttccggcgcttcgactgtaatcggcagcgtgtcgtcgatggtcgcaccaaccggaacgatttccggttgaaccagcggcagctggttcagcacggcaacgtcacgcgcaacaccaatgatgcctaagcagtcggcacggtttggcgtcacgctgatttcgatggtgttgtcatcaagtttcaggtattcacggatatcggtgccaatcggcgcatccgcaggcagttcgataatgccgctgtgatcgtcagaaatgcccagttcagagaaggagcacagcatcccttcagacggttcgccacgcagtttcgccgctttaattttgaaatcacccggcagaacagcaccaatggtcgctaccgctacacgcaggccctgacggcagtttggcgcaccgcagacgatgtccagcaggcgatcgccgccgacattcacttttgtcacacgcagtttgtcagcgttcggatgctgcgcacactcaaccacttcaccaacgaccacgccgtggaagctgccggcaaccggttctacaccgtcaacttccaggcccgccatagtgatttgatttgccagcgcatcgctatcaatcgccgggttcacccattcgcgtaaccacagttcactgaatttcataatctattcctgccttatttaaactgtttgaggaaacgcagatcgttttcgaagaaactacgcaggtcggtgacgccgtaacgcaacatagtcagacgctccatccccatcccgaaggcgaaaccagagtaaacttccgggtcgatgccaacgttacgcaacacgttcggatgcaccatcccgcagcccagcacttccagccatttaccgtttttacccatgacgtccacttctgcagaaggttcggtaaacgggaagtaggaaggacggaagcgaatctgcaaatcttcctcaaagaagttacgcaggaagtcgtgcagcgtgcctttcaggttggtaaagctgatgttggtatcaacaatcagaccttccatctgatggaacatcggcgtgtgagtctggtcgtagtcgttacgataaacacggccaggcgcgatgatacgaatcggtggctgctgggctttcatggtgcggatctgtacgccagaggtctgggtacgcagcaggcgggtagtgtcaaaccagaaagtgtcgtggtcagcgcgcgccgggtggtgaccaggaatgttcagagcatcgaagttatgataatcgtcttcgatttccggcccggttgccacggtaaagccaagctcaccgaagaaactttcgatacggtcgatggtacgggtaaccggatgcagaccgccgttttcaatgcgacgacctggcagagagacatcaatcgtttccgccgccagacgcgcattcagtgcagcgctttccagttccgctttacgcgcattcagcgcctgctgaacctgctctttcgcttcgttgataaccgcaccagctgccggacgctcttctggcggcagctcacgcagggtcgtcatctgaagggttaagtgcccttttttacccaaatattcgacgcgcacattatctaacgcggcaacatcactcgcctggctaatggccgccttcgcactggcaaccagttctgcgagatgactcatggttttcctcattgtgtcagtggtgacactggttcgttggacttagagcctatcccatcaggctattttacttgccattttggtcccgggctgtgctcgaaattctcacgtacttaaatacgctccggtttctccgcgctggccgtgtccagtctggctgcgacaattacacctgatgagacaggctttttatttttcaaaacgcgcatacaaaaaaagcctccactgggaggctttcaggcgctgttttccgtttctcttctcacgcgctagcctcctggattcaggtgctaaagtaaaaaaagaagcggaaaatagcagcattcattgcttgcgttaccttttggtactcttcaaaagacctttattgaaaaggctacggcgataaaagtcaatgttttgatggcgttgaaacgaaaagagggagactagctccctctttcaactggcttatgccagagctgctttcgctttttcaaccagagcggtgaacgctactttgtcgaatactgcgatatcagccaggatcttacggtcgatttcaacagaggcttttttcaggccattgatgaatttgctgtaagaaataccgttctgacgtgctgctgcgttgatacgcgcaatccacagttgacggaactgacgcttacgttgacgacggtcacggtaagcatactgaccagctttgataacagcctggaaggcaacgcggtatacgcgagaacgcgcaccgtagtagcctttagcttgtttcaaaattttcttgtgacgtgcacgtgcaataacaccacgttttacgcgagccatatgtgctctcctgtatctatattctaattaaaaagttaaaaacgttaacggcttatgcgtacggcaggcacgcgattaccaggcccagatcgcctttggaaaccatggctttcggacgcaggtgacgtttacgtttggtcgcttttttggtcagaatgtgacgcaggttagcgtgcttgtgcttaaaaccacctttaccggtttttttgaagcgcttagcagcaccgcgtacggtcttaatttttggcattttaataacttccacttcgcattgttaataaacgaaacaaaggcgaacaaagcctgtgaagcccgaaggctccacagacagtgctacttgaaggccttactgtttcttcttaggagcgagcaccatgatcatctggcggccttcgatcttcgttgggaaggattcgaccactgccagttcttgcaaatcgtctttcacgcgattaagcacttccataccgatttgctggtgcgccatctcacgaccgcggaaacgcagcgtgattttggctttatcaccctcttcgagaaagcgaatcaggctgcggagttttacctgatagtcgccttcatctgtaccaggacggaatttaatttccttaacctggataactttttgctttttcttctgttccttagaagacttgctcttttcatagaggaatttgccgtaatccattatacgacaaaccggcggctcggcgttagggctgatctcgactaagtctactccggcttcttctgctttctccagagcttctctcagactcacaataccaagctgctcgccttccagacctgttaagcgaacttcctgggcgcgaatttcgccattgatacggttagggcgcgccgtttgaactcgttttccgcctttaataccttattcctccaattgtttaagactgcggctgcgaatctcttgttgcagcttctcgatcacttcatttacgtccatgcttcccaggtctttaccacggcgggtgcgaacggtaactttgccactttccacctctttatcaccacagaccagcatatatgggacgcgacgcaaagtgtgctcgcggattttaaagccaatcttctcatttctcaagtctgctttaacacgaatgcccgcattacttagtttttgcgtcaattcgttaacgtattcagactgactatcggtaatattcatgataacaacctgaaccggcgcaagccaggtcgggaagaaaccagcgaactcttcggtcaggataccgatgaaacgttccatgctccccagaattgcgcggtgaatcattaccggtactttacgttcattgtcttcgcctacataagaagcgctcagacgagacggcaaagagaagtccagctgtactgtaccgcactgccatgcacgatcgaggcagtcatacagggtaaattcaattttcggaccgtagaaagcgccttcacccagttgatattcaaacgggatgttgttttcttccagcgcaaccgccaggtccgcctcagcacgatcccacatttcgtcgctgccaatacgtttttcaggacgagtggagagtttgacgacgatcttctcgaagccaaaagtgctgtacatatcatagactaaacggatacatccgttaacttcatcgcgaatttgttcttcagtacagaagatatgcgcgtcatcctgggtaaatccacgcacgcgcatcaggccatgcaggctaccactcggctcgttacggtggcagctaccaaactcggccatacgcagcggcagatcgcgataagacttcagcccctggttgaaaatttgtacgtgacccgggcagttcatcggcttaatgcagtattcacggttctcagaagatgtggtgaacattgcatctttgtagttgtcccagtgaccggttttttcccacaggacacggtccatcatgaacggacctttaacttcctgatactggtactctttcagtttagaacgaacaaacacttccagttcacggaagatggtccagccgtcgttgtgccagaataccatacccggcgcttcttcctgcatatggtacaggtcgagctgtttaccgattttacggtggtcgcgtttcgcggcttcttccaggcgctgcaggtaagcgttaagtgcttttttgtctgcccacgccgtaccgtaaatacgttgcaacattttgttgttgctgtcgccacgccagtaagcccctgccgttttcattagtttgaaatgatggcagaaacgcatgttcggtacgtgcggaccgcggcacatatcgacatattcttcatggaagtacagacctggcttgtcatcatgggcgatgttttcgtcaagaatggagactttgtagctctccccacggttggcgaaagtttcacgcgcttcgtgccagctgactttcttcttaatgacgtcgtagtttttctcagcaagctcatgcatccgcttctcgagtgcttcgacatcttcctgggttaacgtgcggtcaagatcaacgtcgtaataaaaaccgttgtcaataaccgggccgattgccattttggtatgcggccaaagttgtttaatcgcgtgccctaacaggtgcgcacaggagtgacgaatgatctccagaccttcttcgtctttggcggtaatgatgctcagttgtgcgtcgttttcaatcagatcgcaagcatcaaccagttcgccattaacgcgccctgcgatacaggctttcgccagacctggaccaatgtccagcgcaacatccatggggcttacagcgtgatcgtaatggcgttggctgccatcaggaagagttataacaggcattttatatccttatttgcagtggtgacccacacgaaagatcacatacaaagaaaaatttgtttattaacagttcattgcgaaaccatctagccaacaaatgctaaattggttcgcaatcaggtacacaaatgaaagacattaacctctcaccttccacccggttgagcgatgttaacactaaaaaaagggagattgtacctttccgtttcacattgattcgattcgcaattcgtttgtagtgagtacaccagcaaaacgcttaaagaacaactgataacatcacggtgcgtctgaaaggtttactgcgagcggatttacagcagcataaactgaatccagcaaagttcgttgcgtgatttggcggtagtattttaaacgctcatgagattaatgacgaagtggtcatatcacaatgataaaagtgacacaattcttataacaatttttcgtgcacatttcgttctggcgataataattaatcatcatcctcaaaacctccagatatatataaggcgaacagattatgagtcaaaacgatatcattatcagaactcattataagtctcctcatagattgcacatcgatagcgacataccaacaccttcatcagagcctattaatcaatttgcgcgccagctcatcaccctacttgatacctctgacttaagttcgatgctgtcatactgtgttactcaggaatttaccgcaaactgtcgaaaaatatcacaaaattgttattccactgccctttttaccattaactttgccacttcacccatccatacagaaaatatactcattacattacactataaaaaagaaatcatttccttattactggaaaccacgcctattaaagctaaccatttgcgaagcatactggattatattgaacaggaacagttaactgctgaagatcgtaaccattgtatgaaactgtctaaaaaaatccatagagaaaaaaactatacacccaacagtaaatctcaatggtagtgcatgttttttgcaatctccttctgacgctattttttgtcgccatctgtcattgcaatacgcccttgattcattgagaaatggaaaaggcaaagtcaacctgattaaacattactcctccgttgaatccatacagcagcatgtccccttagtccgggacgcggagttcagagcattacttcgccatcctcctgcagggagtcgcgttatcgcgagtaaggattttggcttcgctttagatattttcttttgtcgaatgatggcaaacaatgtcagtcatatgtccgcgattttatatatagacaatcatactttgtcagtaaggctacgaataaagcagtcagtgtatggacaattaaattatgttgtgtccgtttacgacccgaacgataccaacgttgccgtcagagacacccacaggacagcacggggctttctttcgcttgataagttcatcagttcaggtcccgatgctcagacctgggctgatagatatgttcgcaactgtgcaattgctattctgcccctattacctgtgggagttccaggggctattttcgcgggtattgcatcacgaatgccatttgcccctatacatccatcggcaatgttgttaataatggctacaggccagtctcaacagcttattacattattcaaacagttgcccatactccctgaaaaagaaatcattgaaataataactgcgcagaatagcgttggtacacctgctttatttttggctatgatgaacggacatactgacaacgtgaaaatatttatgcaagaaattcagtcactggtagataatcacatcattcatgaagataatctggttaaattactgcaaactaaaagtgctaacgaaacacctggactttatatctccatgttgtatggattcgatgaaataatcgatatctttctgaatgcattaaccactccaatagcacaagagcttttaaacaaaaaactggtgatgagtattttagccatgaaaatacatgatggtgagccaggattatacgccgcaatggaaaataatcaccctttgtgtgtcacacggttcctctctaaaattaatggcatcgcctttaaatacaagttgagcaaagctaacatcatggatttattaaaaggagctacagcacagggaacccctgcattatacatcgccatgagcaagggtaatgaagacgtcgtgttatcttatatatcgacgctgggtgcttttgcaaaaaaacattcttttagtcaacatcagttatttacactattggccgctaaaaatcatgacaacatgtcagctgttcatatagccattcatcataagcattataaaactgtagaaacatattatgctgctattaatgcaatcagccaaagcctgagttttagtgctgatgaaataaagacgtatttataaccagctatttacgatatatatcgatacataattttatttttttcataaaacgcagaaacagtgaccatgtgcacaacgccacccgacggctgtaataacaaaaaatcccttgatgcctgtcccttttgttacactccgttatcacgcacaagagatatgcaggacactggtatgccgactaaacgctttgataaaaaacactggaagatggtggtggtgctactggcaatctgtggcgctatgttgttgctacgttgggcagcaatgatttggggctgagcagtgacaaacgaagacagccagaccgcataacacggtccggcagataattttacatgctgtagcccaggcttaaggttgtccgacggtcggtatgttccggtgcagactctggaggttcagagttccatgtgacgttgtaagccaccttcagtccaaaatgttcattaatagcaacatttaatgcgctttcggagttcagcgttgtgtcttccgcgccaaagacgctaacaccctgcgtaaatttagcgttgtcagtcaactgccatgcataagccccggaggcatagcccagcggctgggtttcactggcattgtcggtatatttgtcgtaacgcacacctggaccgaattcaaagcggaaactgtgtaccgggccattcaaaaactgacgaccataacccgcggtcaacacatcgcgctctcgatagccgttataacggtctgtcagccagcttgcctgaccaaataaatagtcataatcagttaaattaaaacggctacgcccgcccgccgcatatttttcactagaacgctcatcattagaagaagtattactggcgttcccccacaggctccaggcagtggtgtgtccataccaggtcatggtggtgtcagccgtaagactggagcttttcgtattgccactttgtgcaagatatcctgcgttcagattaccttcgaaaggttttttagcgctggcaggatcatccatgacagtaaaaacggaatcatcggcagctgcattcagactcgcaaacatgccccccgccaacataacgatggcaggaactgtcttcaaaagcttcatttatcaagagtccgtacaacaaaaaaagagaccatcgcggtcccggaaactttcttaaggatcaaagattagcgtccctggaaaggtaacgaattataaaaaggcgcgaataacttagcaatgtattcttatttcattttttgaataagcatgtggcgaaaacagatttttatttatatatatttatctgcaaaattttaaataaagctccaataaatcatattgttaatttcttcactttccgctgattcggtgccagactgaaatcagcctataggaggaaatgatggtacgtatctatacgttgacacttgcgccctctctcgatagcgcaacaattaccccgcaaatttatcccgaaggaaaactgcgctgtaccgcaccggtgttcgaacccgggggcggcggcatcaacgtcgcccgcgccattgcccatcttggaggcagtgccacagcgatcttcccggcgggtggcgcgaccggcgaacacctggttagtctgttggcggatgaaaatgtccccgtcgctactgtagaagccaaagactggacccggcagaatttacacgtacatgtggaagcaagcggtgagcagtatcgttttgttatgccaggcgcggcattaaatgaagatgagtttcgccagcttgaagagcaagttctggaaattgaatccggggccatcctggtcataagcggaagcctgccgccaggtgtgaagctggaaaaattaacccaactgatttccgctgcgcaaaaacaagggatccgctgcatcgtcgacagttctggcgaagcgttaagtgcagcactggcaattggtaacatcgagttggttaagcctaaccaaaaagaactcagtgcgctggtgaatcgcgaactcacccagccggacgatgtccgcaaagccgcgcaggaaatcgttaatagcggcaaggccaaacgggttgtcgtttccctgggtccacaaggagcgctgggtgttgatagtgaaaactgtattcaggtggtgccaccaccggtgaaaagccagagtaccgttggcgctggtgacagcatggtcggcgcgatgacactgaaactggcagaaaatgcctctcttgaagagatggttcgttttggcgtagctgcggggagtgcagccacactcaatcagggaacacgtctgtgctcccatgacgatacgcaaaaaatttacgcttacctttcccgctaacaaaaacattcccccagcattgggggaatcatcaccaacctgtcggcaacgcgtttctccgactatgctcaaaagtcatgtgataacaaaggggtgaactatggccagtggcgatcttgtccgttatgtcataaccgtcatgttgcatgaggatacattgactgaaattaacgagttgaataattacctgactcgcgacggttttttgctcactatgacggatgatgagggaaatatccatgagctgggaactaacacttttggacttatcagtacccaaagtgaagaagaaattagagaactggttagcgggcttacccaaagtgcaaccggcaaagatcctgaaatcaccatcacgacctgggaggaatggaatagcaacagaaaataaatggtttttgggcaataatcagtctgtggtgtgcgttagctcgtgtttttacaccgcattcttgcgctaaccttatgatctggcagacaacatgggagagacatcatgtggcaggcaatcagtcgtcttttgagcgagcagttaggtgaaggcgaaatcgaactgcgtaatgaactgcctggcggagaagtccatgccgcatggcatttgcgctatgcaggacatgattttttcgtcaaatgtgatgaaagggaactgcttcccggttttaccgccgaagccgaccaactggagttactgagccgtagtaaaaccgtcaccgtgcctaaggtttgggcagttggcgctgaccgtgactacagttttctggtgatggattatctcccacctcgtccgctggatgcgcatagcgcatttattcttggtcagcaaattgcgcgtttacatcaatggagcgaccaaccacaatttggccttgatttcgataacgcgctctccacaactccacagcccaacacctggcaacgtcgctggagtacgttttttgctgaacaacggattggctggcagttggaactggctgcagaaaaagggatcgctttcggcaatatcgacgccatcgtcgagcatattcagcagcgtctggccagtcatcaaccgcagccttctctgttgcacggcgatttatggtccggcaactgtgcactgggtccggatggcccgtacattttcgacccggcctgctactggggtgaccgagagtgcgacctggcgatgttaccgctgcatactgaacagccgccacaaatctatgacggctatcagagtgtatccccgctacctgccgatttccttgaacgtcaaccggtttaccaactctacacgctgttaaatcgtgcaaggttatttggcggtcagcatttggttattgctcagcagagtttggatagattattagcagcatgatatgggttgaggataatggccgctccgtgcggccttttgattaaataaacccaagcagagaaaagaacacataacctgcagcaatacaaataaccggcaggatatacagactgaaaaactgcaggaaaatagtatggtgcggaacaacaatacgggactcaatttgttcacgcgttagcccctcttcccctttggctttttccagaatgagttgatcttcaacaccttcccgcaagaagcgcgcctggcgactcatccgggcaccggaatcctgcaacgccagtccgacaaaaatcaggatgaaaatcacccagaacataacgttcacgccaccattaaaattgggcgtcggggagttataccagaatagattcaaaaaaggcgtattcgcctgcatcatatcgatcatgacatgagtaaagtcgagcatgaccgcattaatgccttccttgttttcctgccgggtattcataaatttcagcaaagaaatcaatgtagagatcaatgcaggtataaaaatcacccaacccaaaatccttttcaaaacagcaatgcgtccagcttgttgatacgtcatgagttctccttgattaagacgcgtcgtttcacttagtttacctgtagatatctgttttcgcccattctttaaaggcgatatgataggcgcttaatcataagcacggcttaataccttacacataatgctctaaaggagaggttgtaatgagtaccccgcgtcagattcttgctgcaatttttgatatggatggattacttatcgacagtgaacctttatgggatcgagccgaactggatgtgatggcaagcctgggggtggatatctcccgtcgtaacgagctgccggacaccttaggtttacgcatcgatatggtggtcgatctttggtacgcccggcaaccgtggaatgggccaagccgtcaggaagtagtagaacgggttattgcccgtgccattagtctggttgaagagacacgtccattattaccaggcgtgcgcgaagccgttgcgttatgcaaagaacaaggtttattggtgggactggcctccgcgagtccactacatatgctggaaaaagtgttgaccatgtttgacttacgcgacagtttcgatgccctcgccagcgccgaaaaactgccttacagcaagccgcatccgcaagtatatctcgactgcgcagcaaaactgggcgttgaccctctgacctgcgtagcgctggaagatagcgtaaatggcatgatcgcctctaaagcagcccgcatgcgttccatcgtcgttcctgcgccagaagcgcaaaatgatccacgttttgtattagcagacgtcaaacttagtagcctgacagaactcaccgcaaaagaccttctcggttaatgaccaggggcagtgatctcgctgcccctggttctttatctgaaattgcattcaactgacggattaatcgtcaatttaagagaaagagttacaccgtcaccacttccgtgcactgtataaaaatcctatactgtacgtatcgacagtttagtgagttttatcatgacggcggaaggtcaccttctcttttctattgcttgtgcggtatttgccaaaaatgccgagctgacgcccgtgctggcacagggtgactggtggcatattgtcccttccgcaatcctgacgtgtttgttaccggacatcgatcacccaaagagctttcttgggcagcgattaaaatggataagtaaaccgatcgcccgcgcttttgggcatcgtggttttacccacagtctgctggcggtatttgcgctgctggcaaccttttaccttaaggttccggaaggctggttcattccggctgatgcgctacaaggaatggtgctgggttatttgagccacatacttgccgatatgctgacacccgccggtgttcccctgctctggccatgccgctggcgtttccgcttgcctatcctggttccccaaaagggcaaccaactggaacgttttatctgcatggcattatttgtctggagcgtatggatgccccatagtttacccgagaacagcgctgttcgttggagtagccaaatgatcaataccttgcagatccagtttcatcggcttattaagcatcaggttgaatactaaaaaggcaaaaatcacctttctggaataagcaattccatttgaatataagagccagctcacagttctgttaatcttgcgccaacactatgactgctacgcagtgatagaaataataagatcaggagaacggggatgaactttccattaattgcgaacatcgtggtgttcgttgtactgctgtttgcgctggctcagacccgccataaacagtggagtctggcgaaaaaagtgctggtgggtctggtgatgggtgtggtttttggccttgccctgcataccatttatggttctgacagccaggtacttaaagattctgtacagtggtttaacatcgttggtaacggctatgttcaactgctgcaaatgatcgttatgccgttagtcttcgcctctattctgagcgcggttgcccgtctgcataacgcatctcagttaggcaaaatcagttttctgaccatcggtacgcttttgtttaccacgctgattgcggcgctggtcggtgtgctggtcaccaacctgtttggtttgacggctgaaggtctggttcagggtggtgcagaaactgcacgtctgaacgccattgaaagtaactatgttggtaaagtctctgatctgagcgttccgcagctggtcttgtcctttatcccgaaaaacccgtttgccgatcttaccggagccaatccgacgagtattatcagcgtggtaatttttgccgcattcctcggcgtagctgcattgaaactgctgaaggatgatgcgccgaaaggtgaacgcgtcttagccgctatcgataccctacaaagctgggtgatgaaactggttcgcctggtcatgcagttgaccccttacggcgttctggctctaatgaccaaagtggttgcaggttctaacttgcaagacatcatcaaactgggaagtttcgttgtcgcgtcctacctcggtctgctgattatgtttgcagtgcatggcattctgctgggcattaatggcgtgagtccgctgaagtacttccgtaaggtatggcctgtgctgacgtttgcctttaccagccgttccagtgctgcgtctatcccactgaatgtggaagcacaaacgcgtcgtctgggcgttcctgaatccatcgccagtttcgccgcctctttcggtgcaaccattggtcagaacggctgcgccggtttgtatccggcaatgctggcggtgatggttgcgcctacggttggcattaacccgctggacccgatgtggattgcgacgctggtcggtattgttaccgttagttccgcaggcgttgccggtgtcggtggtggtgcaactttcgccgcactgattgtactgcctgcgatgggcctgccagtaaccctggtggcgctgttaatctccgttgaaccgcttatcgacatgggccgtacggcgttaaacgttagtggcagcatgacagctggcacgctgaccagccagtggctgaagcaaaccgataaagccattctggatagcgaagacgacgccgaactggcacaccattaattcttatgctggcaacggtccgttttgtataggggccgttgccttactttttaaatgttccatcgcggcgatgcatacactctcatatttaaacagatcgtcagcgaaaaaaatgtccaacttatcaatacattcctggctcaaactatgtgcctgtaggctgaagcttaaaacctcatacccgagacgttttctaagactactatctggaatactcataatatcttcaagcacaccacttcccattcccggaagatttagtggattaaaaagaagattgatattaagcatacttattatgctaggaaactttaggagactctcatttttttgaatcgcagcaaaaatgctcccgacaggatgtatataattttgttcatagtatatagtccttaaatagtgaataaccaacctgttttttatactgatcaaattggtcattttttctgggcgaaatacagaagtgacatccattccaataaaatctttatttatacctcttatccgaatttcactaccataaagattattaattattactctatatttaacattgtcctgcagatatgtatcaaaactaagtgctggcgctcctggcttactggcatcatagttaatgttagacatataggcaatcatataattaaagttactttctgctatttcatcgcagtcacattgacccgtacttataaagaaagtgagtgctgtcatagtagactgcagcctttctttaaaagagtcgaaagccaggcttttaatatttaaatcaccataattactctgtattaagtttgtagaaaacatctcccgcctcatattgttaacaaaattattatctcatttaaatctaagtcatttacaatataagtttaagagcgacgccacaggatgaactatcaaaaatagctcatcatgattagcaaaacttaaccattttaaaataaataaacaattaaagaaaaaagatcacttatttatagcaatagatcgtcaaaggcagctttttgttacaggtggtttgaatgaatgtagcaacgaaatacagaatttcaggtcatgtaactcccggcaaaaccgggaggtatgtaatccttactcagtcacttccccttcctggcggatctgatttgcccaacgttgggcagattcaggcacagtaaacgccggactgcgcagaaaactctctcccatcagtacaaacgcaacatatttgccacgcagcatccagacatcacgaaagctatccatctttatcgcatgttctggcggcgcgggttccgtgcgtgggacatagctaataatctggcggttttgctggcggagcggtttcttcattactggcttcactaaacgcatattaaaaatcagaaaaactgtagtttagccgatttagcccctgtacgtcccgctttgcgtgtatttcataacaccgtttccagaatagtctccgaagcgggatctggctggtggtctatagttagagagttttttgaccaaaacagcggccctttcagtaataaattaaggagacgagttcaatgagccaacataacgaaaagaacccacatcagcaccagagtccactacacgattccagcgaagcgaaaccggggatggacagtctggcacctgaggacggctctcatcgtccagcggctgaaccaacaccgccaggtgcacaacctaccgccccagggagcctgaaagcccctgatacgcgtaacgaaaaacttaattctctggaagacgtacgcaaaggcagtgaaaattatgcgctgaccactaatcagggcgtgcgcatcgccgacgatcaaaacagtctgcgtgccggtagccgtggtccaacgctgctggaagattttattctgcgcgagaaaatcacccactttgaccatgagcgcattccggaacgtattgttcatgcacgcggaagtgccgctcacggttatttccagccatataaaagcttaagcgatattaccaaagcggatttcctcagtgatccgaacaaaatcaccccagtatttgtacgtttctctaccgttcagggtggtgctggctctgctgataccgtgcgtgatatccgtggctttgccaccaagttctataccgaagagggtatttttgacctcgttggcaataacacgccaatcttctttatccaggatgcgcataaattccccgattttgttcatgcggtaaaaccagaaccgcactgggcaattccacaagggcaaagtgcccacgatactttctgggattatgtttctctgcaacctgaaactctgcacaacgtgatgtgggcgatgagcgatcgcggcatcccccgcagttaccgcaccatggaaggcttcggtattcacaccttccgcctgattaatgccgaagggaaggcaacgtttgtacgtttccactggaaaccactggcaggtaaagccagtctcgtttgggatgaagcacaaaaactcaccggacgtgacccggacttccaccgccgcgagttgtgggaagccattgaagcaggcgattttccggaatacgaactgggcttccagttgattcctgaagaagatgaattcaagttcgacttcgatcttctcgatccaaccaaacttatcccggaagaactggtgcccgttcagcgtgtcggcaaaatggtgctcaatcgcaacccggataacttctttgctgaaaacgaacaggcggctttccatcctgggcatatcgtgccgggactggacttcaccaacgatccgctgttgcagggacgtttgttctcctataccgatacacaaatcagtcgtcttggtgggccgaatttccatgagattccgattaaccgtccgacctgcccttaccataatttccagcgtgacggcatgcatcgcatggggatcgacactaacccggcgaattacgaaccgaacagcattaacgataactggccgcgcgaaacaccgccggggccgaaacgcggcggttttgaaagttaccaggagcgcgtggaaggcaataaagttcgcgagcgcagcccaagctttggcgaatattattcccatccgcgtctgttctggctaagtcagacgccatttgagcagcgccatattgtcgatggtttcagttttgagttaagcaaagtcgttcgtccgtatattcgtgagcgcgttgttgaccagctggcgcatattgatctcactctggcccaggcggtggcgaaaaatctcggtatcgaactgactgacgaccagctgaatatcaccccacctccggacgtcaacggtctgaaaaaggatccatccttaagtttgtacgccattcctgacggtgatgtgaaaggtcgcgtggtagcgattttacttaatgatgaagtgagaagcgcagaccttctggccattctcaaggcgctgaaggccaaaggcgttcatgccaaactgctctactcccgaatgggtgaagtgactgcggatgacggtacggtgttgcctatagccgctacctttgccggtgcacctagcctgacggtcgatgcggtcattgtcccttgcggcaatatcgcggatatcgctgacaacggcgatgccaactactacctgatggaagcctacaaacaccttaaaccgattgcgctggcgggtgacgcgcgcaagtttaaagcaacaatcaagatcgctgaccagggtgaagaagggattgtggaagctgacagcgctgacggtagttttatggatgaactgctaacgctgatggcagcacaccgcgtgtggagtcgcattcctaagattgacaaaattcctgcctgatgggaggcggcgcaattgcgccgcctcaaatgatttacatagtgcgctttgtttatgccggatgcggcgtgaacgccttatccggcctacaaaactgtgcaaattcaatatattgcaggaaacacgtaggcctgataagcgaagcgcatcaggcagttttgcgtttgtcagcagtctcaagcggcgcagttacgccgcctttgtaggaattaatcgccggatgcaaggttcacgccgcatctggcaaacatcctcacttacacatcccgataactccccaaccgataaccacgctgagcgatagcacctttcaagctcgcacttgtcaacacatccagctccgttaagcgtgggaaacagtaagcactctgacggatagtattatcgataaacgccggatgacacatcacctccaggctacgatcaccccgatggcctgcgtcatccagcacttgcaggaacaggctctcactgatctcttcaccgtagaatgcactgctgaatccctgggtagtgcgcaggttgaccggcaaatcaaacgccatctgacgatccgcccgcaacgcaatgccctgctctgccgcaaacctggcaacaatcgggaaaatctgcgggaacatatgcacatgatgatggctatcaagatgcgtaggtttgcgtccaaatagctcaatgaaacgcaaatactgactgacaagctcctgagtaatttcttccagcggtaaagcatcttcttctgccaactgccagatccattttcccagcacaccatcgcgggttaaccccggcatagctgtcagtggcttacccatagtaaggacaaagtgcatccctatggccagactcggttcatcacgactcaactgcaccgcatggtcaatagcctgcccattcaccagcgccgtcgtgctcgtgacaatcccattgcgacaggcctcgataatgccgtagttctgacctttgcttaagccaaaatcatcggcattaacaatcagtaagcgttccataatcagcctcggttaatgtgcttttttaagctctgcgatgcagtcggcaaagtttggcagccatttctcgtgcgccagaatcatctcgcgtgccagcagctcagcatcgcgatcggaatgcaccaacggactaaggtttagcgccagtaacacatcgttaaattctccgctaagtgcggcgttactggcagcaatctcgaagcctttaatggtgtgaatcagccccattactttatcatcgaaatgcgtaatgcgcggatgtggcgtcgcgccatcgcgccccagcttacaggtcatttctactgcccagtctgccggaatattatcaatctgcccatgatgcgggatattaacgtaatgttctgcttgcttgtcgttgtagatagcgttgatcacttcgcatgctgcatcagagtaataagccccaccgcgctgttccagttctttcggcttaactttcagctcaggatttttatacagctcaaaaagttgtttctcgactttctgtactacctgcgctcgtgcgccgcctttgtagtattcgcccatttcaatagccagcatctctttctgcttgaagtaatacagcagataagaacatggcagcagattcaagctacgaattaagccctcactaaatggcagatcgaaaatattttttacagaggacgcttttaactgcccactcgccacaccatcaagcaattcggcaaagcggctcttgccatttatcagcacatccttaatgaacaccatatggttgaggccgaacaaatcgatagataaatcatcgctgtctttcagcatcagaacatcgcgaataaacatcttcatgccgatcggaatattacacacgccgataaagcgtttaaatccggtatgacgataaacggcttcagtgaccattcccgccgggttagtgaagttaatcacccatgcattcggacaaagttcttcgacatcttttacgatgtcaaaaatcaccggaatggtacgcagacctttaaacaaaccgcccgcgccgttggtttcctgaccaagataaccatgacttaatggaatacgttcatccagttcacgcgccggtaattggccaacgcgcagttgggtagtaacgaaatcagcatctttcaatgcttcgcggcgatccagcgttttataaagcttcatcgggacgccagcgttatcaatcatccgttggcagagatcgaaaataatatccagtttcggtttaccaccttcgacatccaccagccataattcgctgaccggcaattcgtgataacgcttaataaatccttccagtaactccggggtatagctgctcccgccaccaatagtgacgacttttaatttctggctcataatttctcccttcagtacagaatactgatatctggcatatctgcccccccggacataaataatccagcaacaggacagatatgtgaattgtcaggtataacgacttactgattaaattcagtcaatttcttacgatagctcttaggcgtaaaggacgttaatttcttaaacgttttaataaacaaactcgggctactataaccggcctcaaacgcaatatccgtcacactatagttggtcatttccagttgttttttggcaaaattaatacggatttcattaataatctgcattggcgttttgccataatatcgttgagtcgctcgcgtcaaatattcctgacttttggcactcaacgccaccatattctccagcgcgctttcactaaactgctctttatcatgcatcttttctaccgtacttttcagccactgcggtacatcatcaatcacctgttcttcgcggtaatgacgtaaacggttaatgacataaaaagtaaccatctcaacaaactcttccagccctgtttcgcggaaattcaaactagaaatcactgtttccacataggtgagaaaagcgttattggtccggtatacctggctagcgacaaagcaataaggcaacaatggcaggtaatgctgctcaaaaaagcgtttactgatcccaacgttcaatatgcgcgtggcaccaaactcataaaaactttgatggtggctacctaacggaataaaaacaaaatcgccccgttccagtaacacgcgcttaccgttaatctcctggaaataacgcccggttaataccagagtaaattcataatagtcgtgctgatgcagtccgctgatactctcagttttgttatagataaacacatggaagtttttgccattaaacaactgctgttctcgggcagtggcaatttccggcgcgttaatcactggctgcatcatcgactccttatgccttcagtttttcatgaagctcaattaattcagtaatcagttcacgcgcaagcatggacgtcattaaatgatcctgagcgtggaccagcaccagactcactttcatcttaccttcgcccgcatcgccttcaatcagtttcgtctgtaccagatgcgcttcattcaatgccatccgactctgatccatcatggcttttgctgcggcaaaatcgccctgcttcgcctgtttcagtgccgcatacgccaggctgcgcgcttgtccggagttgatgatcagccccatcaccacttcttccagctcttcagcttccgtttgcgtatcgggaatgttatcgagatccatcatacatcgttcctctcttttcttaccggcacgattacccgtaccggcatcgattaaaatttcagggcgttagcgatatcttcttcgctctcttctttatcaatcgcattttgtgctttgttagccaccacaacaaagggcagataaattaacgttgcgatgccaaggttgaagagtgcgaccagcaatgcggcgacgctaccgttggtgttaaagaaggctcccagaccggttggcatggtccacggtgcaatattggtcaccggaggaataatgcccatgtagtacgctgcgagggtgattgccgccagaatcggttgtaccagtacaaacgggataaacatcaccgggttcatgataattggcagaccaaacagaatcggttcgttaatctggaagatgccggacggcagcgccagttttgccacctgacgataatcagcacggcgagaggcgataaagatagccaggatcaggcctaaagtcgcaccactgcccccaaggaaaataaaggagtccagcatcggcttggcccagatatggaaggtcttaccggctgccagcgccgcttcgacggaaccatattgctgataggtcgcgatattttccagtgcccacggcgtcataatgccgttgtccagtgcggtcagcgccagcgcgccatgaataccgaagaaccagagcagtggaacaaagatcacataggcccagcccaccacgctacccaagcttgccagtggggtactgatggtatccataatgatctgatggaagttggtgccccaggtattcaacgcccaggcaataatccccatcacggaaagaataataaagccgggaattaatgcgctgaaggaacggcttacactagcaggtacgctgtcgggcagtttaatgacccaattgcggcggacaataaaggtaaacatttctgccaccaccaggccaataataatcccggagatgatattcgccccacctaaccagtttgcaccaaccgcataggcctcaccgacactatatggggtgacggtcataaatgctgcaacggataacaacccagccgccagcgcatcgactttacgctcttctgccagcgccatgccaataaagaacggtgccattaaagacattattcctaatgttccgttatatacgttgccgccaatacctttcagaccattaagtgtttcaatggtactggcgtcgaggcgaatacctaaggaataaaaaaagctcccctccccaaagcttagaaaaacgttgttaattaatacaaacatggcccccgcaagggttaacggcattaagcgaataaagccatttttgattgcattaacgtgtggctgctttcctattttaactgcaaaagggaggagtaccttttcaaggcttgcaataacattactcatagaaaaatacccttaaaaaccgcaatttaaatattgcggtattgatttatgaaataactctttgacgggaaaatttaaaataaattaatttgctgcggcttttttaatcgctgcaaccgcagccttaagcacgcctaaaccatcgactttgccataaagcaggctgtcaattacttcaaccggtttgttgggtaacaaacgctggatttcgggcaacatataagcaatctgcggccctaataacacgacatcggcattctgacctttttcaccagccagtgtttccggaaatgcttcaataatgaccggaacttcatatttttctgcctgtgcgcgcattttacttaccagtaaagaggtagacatgcccgcagaacaaaacagataaatgtgtttcttttccataaaactgccctcatcgacgattatctgtcagccagacactccgcaagccttaacctgcttccatgctctgggtaacttgcgaaaccaacatgactttttttgtggctgaaaggagtatacggtatagacctgagcaatagtatttctttgaccttataaattgtttctccttgacctgtggttatgaccctcttcacatttcgggcaaataattcgcgaagataattaagaactcaggccaaaaaaaaccggcgcaatggccggtttccgttgttactcaagctttcagacgaattgattacttcgcagcctgtggatcagtgtcgtattcagcacaggtctgataaccggagttgatgacatatccggtatcatctaacgcgacaaagtaggtttctgctttaccatcacgttgacccaggatgtaggtctggcaagtaccgcgagcatggatcatgctcacttcagagctaggtttacccgcaatttgtgcaacctgcgcccggctcatgccttttttgacgtctttcaccacaggctgtacaaactggtctttggtacgatcataagccgtacaacccgccagcatggttaataccgccgctgcactcagaattcctgccatattcttgttcatattccgtcctcttgtttatcagcgtgttagataagcctggaatacattgggcgctttttcaagcccgtgaacgaaacggctccgctttcagaggattcctgtatgacgttttaaccaccattcagcccgctgtcgcttgtcgtttcagtagcaacgggttagctttaaggaagttttgtcttttctgtctggaggggttcaatgacattgcaacaacaaataataaaggcgctgggcgcaaaaccgcagattaatgctgaagaggaaattcgtcgtagtgtcgattttctgaaaagctacctgcaaacttatccgttcattaaaagtctggtgctcgggatcagcggcggtcaggactccacgcttgccggaaagctgtgccagatggcgattaatgagctgcgcctggaaaccggcaacgaaagtctgcaatttattgccgtacgcctgccctatggtgttcaggccgacgaacaagattgccaggatgccattgcctttattcaaccggatcgcgtattaaccgttaatatcaagggcgcggtattggccagcgaacaggcattgcgggaagcaggcattgaactgagcgattttgtccgtggcaatgaaaaagcgcgtgagcggatgaaagcacaatatagcattgcgggtatgaccagcggtgtcgtggtgggcaccgatcatgcagcagaagccattaccggattcttcactaaatatggtgacggcggtacggacattaatccgctgtatcgtctcaacaaacgtcagggtaaacagttactggcggcattagcttgcccggaacacctttataagaaagcgccaacggccgatctggaagatgatcgcccttctctgccagatgaagtggcactcggcgtgacctatgacaatatcgacgactatctggaagggaaaaacgtacctcaacaggtcgccagaacaatagagaactggtatctgaaaaccgaacataaacgccgtccgccaattaccgttttcgatgatttctggaaaaagtaataatttgcacatattggattgtgcgaaaaagagtaatttgttcacgccggatgcggcgtgaacgccttattcgacctataaaactatgcaaattcaatacattgcaggagtcgaataggcctgacaggcgtagcacgtcagacggtgtaacctttgtcatcgacccgcctcttttttaatcgcttcccgcctgttacactggatagataaccagcattcggagtcaacagtggtacggcgtttaacttctccgcggctcgaatttgaagctgcggcaatttatgaatatcccgaacatttacgtagtttccttaatgacttacccacccgaccaggggtgtatctgtttcatggtgaaagtgacaccatgccgctctatatcggcaaaagcgttaacatccgcagccgcgtcctttctcatttacgtaccccggatgaagccgccatgctacggcaatcccgacggatcagctggatatgtaccgccggtgaaatcggcgctctgctccttgaagcgcgattaatcaaagaacaacagccgctgtttaataaacggttgcgccgcaatcgccagctctgtgccctgcaattaaatgaaaagcgcgtcgatgtggtgtatgccaaagaggtggattttagtcgagcccccaacctgtttggcctgtttgccaataggcgcgcagctttgcaagcattgcagaccatcgctgatgaacaaaaactttgttatggcctgctgggactggaaccgttaagtcgcggtcgtgcatgttttcgtagtgcgctaaaacgttgcgccggagcatgctgcggtaaagagagccatgaggaacatgcgctacgcttgcgccagtctctggagcgtttgcgggtggtgtgttggccttggcaaggggcggtggcgctgaaagaacagcacccggaaatgactcaatatcatattattcaaaactggctgtggctgggggcggttaatagcctggaagaagcgacaacgttaattcggacacccgccgggtttgatcacgacggttataaaattctttgtaagccgctgctttccggtaactatgaaattactgaacttgatccggcgaatgaccagcgagccagttgattactgaacttgatccgggctatgaccagcgagccagttgatttcactgaacaacagtttaccttgcggttgtaaaagccgcagggtgtgcctgccatcgaaccagcacgcgccctggtcggtagtgagcaatttatcgcccagttgccacgccccgttaatcacaaacaccaccccgccgcgactgccaaaggtagtaaacgtacgttcggcaattctgactttcgccttacagacatccaggcgtgtcatgatgttgaaatccatgctcatctgccctgccgtcagtttcgcttttaccacctggtccgctgcaaaggcaaaaggctggaacggttttaaggtatggttaaagcggtctgcgctttcaaggagcatctcgccgccttccagcaacgtcactatcctttccatgccgggaaacaaagaaaactccccattcgccgcgatggatgcaatgctggcacgccagtaaaaatcacgttttgccggtgggaacgtgcaaatttcgcgcgtttcaccggcagcatttcgccacagattcacgctcattttacgcatatcaaagtattccatactcgctcccggcccgttcttttcattgttatcgttcaggtaaccgtggatggttatcggcaactcgggtgatttacgttagtggtgatcaggctttttttacaactgtttgagaagagaaaagaaaaccgccgatcctgtccaccgcattactgcaaggtagtggacaagaccggcggtcttaagttttttggctgaaagattattcagcagttgcaggcattttaccttttgccgctggacgttctgtcagacgcttctcaaaattagcattaaattgctttttctgttccggcgtcaggatgttgtaaattttgttctgggtttccatgtgcgccagcatgttagctttgcgctgttcttccatttttgcgatctgcgcttcagcttttactttatcgaaggtatcgctggcaatgatgtcatgcattgcgcggcgttcttccagcggcggacgtttcatctggtcacgctggcctttcatgatttcgcggatctgctgtttctgcgcgtcggtcaggttcaggtctttgaacatcatgtcctgatgcggaccgaacttgcctttgtggtgcatcatcggcttcgcgtcagccggtgctgcggtagtggtgtctgcggcatgggccaggttagccgcgccaagagccagggtagaggcaacaaacagtgcagttaatttacgcatattctatatccttcctttcagttatttattacggctttcttaagtagcgtgccgtgttgacgagattaactttactgactttagcgtcaattaatcagagcaacggtaaaacaatgaaagtgtaaaaaacacttttgcgccaattatggagaaaaaaagaaaatttgatggagagtgatgagagaatattacaacacgatgattttgcagagattatgaagaactataccggatgactggtgataaataaagcaaataaccaggattaatctgtattaatttataagaaagcaacttaatacccgcagaatgatttctgcgggtaagtattagcttattttttcgagcattaatcccgcgcgtaatcccaacgctaccaacggattagggaataacacatactctacatcatgggttacggtaaaacgttcctctccgtcctgcgccagcaatgttcctttctcaaacggcataaaattcagcgtgtcacttgccatatgcatttcgaaggacgggctgtggcgagtaatttggctaaccacccgataacggagcggcggtgttctcacgataccgacactctcaccagatagcagcgcagcaattgcgctggcagttactgcaaactggcgaagatcgttttgcccaaagggcaacgctttgccaagttccagcgtacaggccagcgcgccaaaatgtctggcgctgaaatgggtaaacgtaccaccaggttcctgatggaacaccagcgcctccagccccgccgcacccagccacgtcagaaatttctcgtcccagggaatgtcgcgttgcggtaatacaccgaactgcggatgcaaggagccacgaattgcggtatgtagatcaaggtgccagcgcacagattctttgccctggtcataaaaatcttccaggcactgttccagttcgcgcgcccgacaggtttctccgctttcagcaaatagctgccaacgaccgccaaacattcgattcatatcgctatggcaataacgtttcccttgcttcagcgcaggaggattcccgaggatcaccagcaaccgccaacgtaacgggatctcgccgtgagatatcgcgccaagcaacgcgtccagcatctccacaggtgccgtctcattaccgtgtattcccgcactaatcaccagtgcgccttgcggtggcgttaatggcgtcagttccagcacaccatcgcccagccagcgccagcgaacgccgttgatttctcgctcggtgataaccggttttttacccgttaaggtcagagcaagaaaattatccattgccccctccctcgcgctggaacggataaacgctaccgagattcagtaattggctcaatacatccagtgcttcccgcccttcgcgcagcaattgcgggtcggccagatcggcagcagtaaggcgatcgcggtagtaacgatccacccagtcattgagcgcattaaacagcgtatcgttcatcatcaccgccggattcaccgcccggcgttcttcttctgtcaataccacccgcaaccgcaggcacgccgggccgccgccattcgccatgctttcacgtaaatcaaagacttttagttcgctaatcgggttgtcagcggcaaggagttcattgagataaccccatactccggcgtgttcccgacactcctgaggcagcaccaacatcatggaaccatcatcgcggctcagcagttggctgttaaacagataggtagacaccgtatcagacacggaaacctgagttgccggaacttctatcgccataaaaccattgacccgcgcacgcaggtttgccagtaactgactctggcgagcgaacgcctgttggtggcaaaacagcacctggcggttactcacggcaatcacgtcattatgaaaaacgccctggtcgataacgtccgggttttgctgggcgaaaatcacctgttggggattcacctgattcagccttgccaccgcctcgctggcttcgcgagtctgtcgcgccggataacgggaaggccgggtatcattgccttcttctcgcccgtagacaaaaagttgcatacccggttcaccgtaatgaccgccgagacgattgtggtttgccgccccctcatcaccgagcaacgctacctgtggcaacgcgctatggacgctaaatttctcttcgtcgttaaaaatcgcttttaacaggctttcagtgacgggcgcttccaggctacggtgaaatttattgttcaggttggcaacggtgagatgcactttgccatccagcgtatcggcagatggcgcgatcgttgccgcattggctacccacattgggctagcggaactgacgctggaaagccagtgcggtgcctggcgtgcaactttttccagtacctgctcatcgctaccactgaatcccaactgacgcagcaccggaataaacggacgctcgtgcggcgggatcacggcctgggggaatcccgcatcggcaagggctttcattttcagtaagccctgcttcgccgccagtcgcgggttagacacctgaaaacggtgacgggtagaggcttcattaccaaagctcaggcccgcgtaatgatgcgtcagccctaccagcccgtcgaaattgacttcccaggcgttcatcgcaccacctcatcggaaaaatccagcccggggttaagcgtggcgggcaatgttaagctgtcgctctccaggctcgccatcggccatgcgcagtaatctgcggcataccaggcgctggggcgatggttaccggaagcaccaatgccgccgaatggcgcggtactggcagcaccggtaagcggtttgttccagttaacaatccccgcccgcgcctccagcaacagttgatcgaacttttcccgctcgggggaaaccagaccgcaagagagtccgaagcgagtgttattcgccattcgaatcgcttcatcgaaagtatcataacgccagacgcgcaataacggtccgaacacctcttcatctggtacgccagcaacgcctgtcatttcaatgatccccggcgtcagcaagcttgtccctgcttgtaataagcgcggcgcaagcaggggtcgtccgcccatcgcttccagttgctgccatgcagtaaccacctgctgtgcggcctgttcagaaatcagcccgccaataaacggctgcggttcgtcatcccagttgcccggcgttaatcgctggctgacggcaaccagacgagcaagaaacgcatcgccctgcgccccgcttttcagcaataaacggcgggcgcaggtgcagcgttgaccggctgtgacaaacgcgctctgaatggtcagatggacagccgcgtcgatatccgccacctcatcgataattagcggattattaccgcccatctcaagggcgagaattttctccggctgaccggagagctggcgatgcaactggtagcctgtattggcgctaccggtaaacagcaaaccgtcgagatcctccagcgcactcagcgcctgacccgtttcacgcccgccctgcaccaggttcagcacgcctggcggcaagccagcctgctgccataaacgcattaccgcttcgccactccacggtgtcagttcgctgggtttaaagataatggtgttacctgccagcaatgccggaacgatatgtccgttcggcaaatgaccagggaaattatacggcccaaacaccgccagcacgccgtgcgggcgatgtcgcaggctcgccgcgccgtccggcatttcactacgctgctcgccggtacgaacgtgatacgccttaatacttatcgcgattttattgatcatcgccgtcacttcggttgccgcttcccagcgcggcttacccgtttctctggcaataatcgcggttaattcggctttattgctttccagcagtgcggcaaagcgttcgacaacggcatgacgttcagcaaaactaagccgcgcccagcgcggaaacgccgcacgggctgcccgacaagcctgctcgacctgagcggcatcggcatcattgccttgccataacacctcgccgcttaccggattacgcttcacacggcttgcgccctggcccgttatccagtcaccgttaatccataaagtcatgctgttttctcctctgcgcacaggcgcaccagacgaacgcgatccccggcgtggcatttgagggcatccagttgtgcggcggttaaaatcaaacgctcggttgccggatcggtacgcaccagcaccacgcggaaatggtgataattttcattggcgaccaggcaggctgggaaatcgccctgcgcaggctgcccttctgccacttccaccagccgacttttacggatggcgcgcacgcggtcgatgtcacactcaagcgtcggcccaccgtcaaagatgtcgatatagttacggtagcgaaaaccttctttctccagcaccgcgcgggcaggcgcggtttgcggatgtacctgaccgatgacgtcctgggcttcctgggataaaaagtgggtatagatcggatgtttcggcatcagttctgcaataaatgccttttgcccggtgccgcagagaaaatcggcgcggctaaaatccatgctaaagaagcgtttaccgaggctttgccagaacggactatagccgtgttcgtcaatcaccccgcgcatttcagcaaccactttgtcattaaacttgtcgcgaaaagccgccataaacataaagcggcttttgctcagcaaatagccgttgccctctttgcgccagtccgggtcgagaaacagcgtgcacagctcgctgctgccggtgtgatcgttactgagaaacagcgtcggcaatgcgttatagacattcagctctttactggcgtgaaccaacgtgccgacgcgatagttgtaccagggatcgttcagcccaaccgccacctcaatggcacaaatccccgccacggtgcctgtctcgctatcttccagcacgaacacatagccctgctcacttttgggcagttcgccttgccaggttttgattgccctttcgatacgcgcgctaagcgtggcttcattggcgggaaggctcgtcaggccgccgcccgttttgctggcaagctgcatcagcgcgctgacatcacttcgctcaacgggacggatgaccatcatgatgaacctcggctaacaaattatttcaactactacctcggctaacaaagtgttcgcaagcagctgcaaagcgatccagtccggtcgtcacctcttcttcgctgacattgagcgcaggcgcaaaacgcaccacgttgccacccgcaatcagtaccatcacgcctgctttcgccgcttcctgagagatctgtttcgcttgcccggcgtaatcggcattcagtacacagccaatcagcaaacctaagccgcgaacttcactgaacaaaccatagcggtgattaatagtattaagacgctcaacaaaccagtcgtgacgctgtttaacgccattaagcatctctggtgtgttgatgagctccagcactttgcctgccaccgcgctggccagcggattaccgccataggtggtgccatgagtgccaacggtcatcacgcgggcgcactcttcggttgccaacaacgcaccgaccgggaaaccgccgcccagcgctttggcggtagttaacagatcaggcgtcacgccgtagtgcatataggcatacagttccccggtgcgcccgacgccggtttgtacttcatcaaaaatcaacagcgcattgtggcggttacacaattcacgcagaccttgtaaaaacgcgttgctggctggcaccacaccgccttccccctggatgggttcgacaatcaccgcacaggtagagtcgtcaatcagcgcgctggcagagttaatatcgttatatgcagcatgacgaatatccgccggcagtggcgcaaaatcctgactataggctggctgcccacccgcactgacagtaaacagcgtgcgaccatgaaacgcatttttgaacgccacgatgccgctcttatggctgccgtagcggtcgtgagcgaatttacgcgccagttttagcgccgcttcgttggcttccgcaccggagttacaaaagaagacgcgatcggcaaacgtggcgtcgatcaattttttcgccagtcgcagtaccggctcgttggtgtaaccgttgccggtatgccagaacttactcgcctgttcgttcagcgcttcacgcagttccggatgcgcatggcccagcgcgttcaccgcaatgccacccgcgaagtcgatatactctttcccctgctgatcccacaagcggctaccttcgccacgtaccggtataaagggtgccggagcgtaaacaggtatcatccattcatcaaagttttcacgcgtaattggctgagacatagcgacctctacagtaaataattcgttatttatatgttaataataagtaatgtttgcgctgtaaatgtagattgcagggttcgtgccagccagtgataaaagtgcataaacggcggaggctaactggaaatcaaggagttataaccaaaccatatgcatttaaagtgcatataaagtgaatacgtttgcgatgtgggtgaataaaaagaataaaaaacgcaatgttatgcagaagtaaaatataattctggaattgtgatcattgacgaaatttactggaaattactgcgccattctgacgcagcgcgcaccaaaagcgggcatttttttgcgccatcgttgacatcattaacaaccatcgatcaaatcacttaacaacaggcggtaagcaacgcgaaattctgctaccatccacgcactctttatctgaataaatggcagcgactatgaaatttgtctcttttaatatcaacggcctgcgcgccagacctcaccagcttgaagccatcgtcgaaaagcaccaaccggatgtgattggcctgcaggagacaaaagttcatgacgatatgtttccgctcgaagaggtggcgaagctcggctacaacgtgttttatcacgggcagaaaggccattatggcgtggcgctgctgaccaaagagacgccgattgccgtgcgtcgcggctttcccggtgacgacgaagaggcgcagcggcggattattatggcggaaatccccagtctgctgggtaatgtcaccgtgatcaacggttacttcccgcagggtgaaagccgcgaccatccgataaaattcccggcaaaagcgcagttttatcagaatctgcaaaactacctggaaaccgaactcaaacgtgataatccggtactgattatgggcgatatgaatatcagccctacagatctggatatcggcattggcgaagaaaaccgtaagcgctggctgcgtaccggtaaatgctctttcctgccggaagagcgcgaatggatggacaggctgatgagctgggggttggtcgataccttccgccatgcgaatccgcaaacagcagatcgtttcagttggtttgattaccgcagtaaaggttttgacgataaccgtggtctgcgcatcgacctgctgctcgccagccaaccgctggcagaatgttgcgtagaaaccggcatcgactatgaaatccgcagcatggaaaaaccgtccgatcacgcccccgtctgggcgaccttccgccgctaatttagcagctctcctggctcaaactgggtcaggagaattaaccttgagaaaaatcaacaaactgtcagtaatgatttgttgcctgccgtcctttgttataccgtctctgcgtttttagttgtctgaccacttctctattatcaagtttgatataggaaactccacgatgaacgctgagcgtaaatttctttttgcctgtcttatttttgcgctggtcatttacgctatccacgctttcggtttattcgatctgctcaccgatttaccccacttacagacactcatccgccagagcggatttttcggctatagcctctatattctgttattcatcattgccaccctcttgctgttaccaggaagcatactggtgatcgcgggaggaatagtttttggcccgctcttagggacactactcagtttaattgccgccacgctggcctccagctgcagtttcctgctggcgcgctggctgggacgtgatttactgctgaaatacgttggccatagcaataccttccaggccattgaaaaaggcattgcgcgtaacggtattgattttcttattctgacccgcttaatcccgttgtttccttacaatattcaaaattacgcttacggattaaccacaatcgccttctggccttatacccttattagcgcactcacgaccctacccggtattgttatttataccgtgatggcaagcgatctcgccaatgaaggcattacgctgcgctttattttacaactctgtctggcgggcctggcgctgtttattctcgtccagctcgcaaaactctacgcccgacacaaacatgtggatctgtctgctagccgccgcagcccacttactcacccaaaaaatgaaggataaaacgatgttgcaacattatagtgtgagttggaaaaaaggactggctgcactctgtttactggctgttgctgggcttagcggctgcgatcaacaagagaatgcggcggcaaaagtggaatacgacggacttagcaacagccaaccgctgcgtgtcgatgccaataaccatacggtaaccatgctggtgcaaattaatggtcgtttcctcaccgacgacactcgtcacggtattgtgtttaaagatggctccaacggacataaaagcctgtttatgggttatgcgaccccgaaagcattttatgaagccctgaaagaggcaggtggtacgccgggcgaaaacatgacgatggataataaagaaacgactcatgtcacaggcagcaaactggatattagcgtcaactggcaaggggcggcaaaagcgtattccttcgatgaagtgattgttgacagtaatggcaagaaactggacatgcgctttggcggtaatttaacggcagcagaagagaagaaaacgggttgcctggtgtgtctggatagctgcccggtcggcatcgtcagcaatgcaacatacacttatggtgcggttgaaaaacgtggtgaagttaaattcaaaggcaatgccagtgttctcccggcggataacacgctggcaacggttacctttaaaatcgccgaataaagccaggataaaggatgatgatgatgcaaagccgaaaaatctggtactaccgtataaccctcatcatcctgttgttcgctatgctgctggcatgggcgctgcttcccggcgtccatgagtttatcaatcgcagcgttgcggcgtttgccgccgtggaccaacagggtatagaacgctttattcagtcttacggcgcactggcggcagttgtcagcttcttgttgatgattttgcaggccattgctgcaccgctacctgcgtttttgatcacctttgccaatgcgagcctgtttggcgcgttctggggcggcttgctgagctggaccagtagcatggccggcgcggcgctgtgcttttttatcgccagagtgatgggccgcgaagtggtggaaaaattaaccggcaaaaccgtgcttgacagtatggacggctttttcactcgctacggcaaacacaccattctggtctgtcggttattgccttttgtccctttcgatccaatcagctatgctgccggtttgactagtatacgttttcgcagcttttttatcgccaccgggcttggtcagttaccggcaactattgtttattcctgggcgggcagcatgttaacaggcggtactttctggtttgtcaccggactgtttattctgtttgccctgaccgtggtgatttttatggcgaagaaaatatggcttgaacgccagaagaggaatgcctgatgggtttaccgccgcttagcaaaattcctttaattttacgtccacaggcgtggctgcatcgtcgccattacggcgaggtgctaagccccattcgctggtgggggcggatcccgtttatcttttatctggtgagcatgtttgttggctggctggagcgcaaacgcagtccgctcgatccggtagtacgaagccttgtcagcgcgcgcattgcgcaaatgtgcctgtgtgagttttgtgtggatatcaccagtatgaaagtcgccgagcgcaccggcagcagcgataaactgctggcagtggctgactggcggcaaagcccgctctttagcgatgaagaacggctggcgctggagtacgccgaagccgcaagcgtaacgccgccaacggtcgatgatgccctgcgtacccgactggctgcgcattttgacgctcaggcgctcaccgaactgacggcattgatcggcctgcaaaatctgagtgcccgttttaattctgccatggacattcccgctcaggggctgtgccgtattcctgaaaaacgttcttaaggagagatgatgcgccattgtgggtggttgctgggattgttaagcctgttttctctggcaacacatgccagtgactggcaagaaattaaaaatgaggccaaagggcaaaccgtctggtttaacgcctggggcggcgataccgcaattaaccgctatctcgactgggtgagcggcgagatgaaaacccattacgctataaacctgaagattgtccgtctggcggatgccgcagacgcggtgaagcgcattcagaccgaagccgcagccggacgtaaaacgggcggcagcgtggatctgctctgggtgaacggcgaaaacttccgcaccttaaaagaggccaatttattacaaacgggctgggcggagactctgcccaactggcgctatgtcgacacacagctgccggtgcgggaagatttttctgtgccgacacaaggtgcggaaagcccctggggcggcgcacaactgacgtttatcgcccgccgcgatgttacgccacagccaccacaaacgccgcaagccttactggagtttgctaaagccaatcccggcacggttacctatccgcgcccaccggactttaccggcacggcgtttcttgaacagttgctgattatgctgacgcccgatcccgccgcattaaaagaagcgccggacgatgcgactttcgcccgtgtcactgctcccttgtggcaatatcttgatgtgctgcatccgtatttgtggcgcgaaggaaaggatttcccgcctagtcccgcgcggatggatgctctgctgaaagccggcacattgcgcctgagcctgacctttaaccccgcgcatgcgcagcaaaaaatcgccagcggcgatttgcctgcaagcagttacagttttggctttcgcgaggggatgattggcaacgtgcatttcgtcaccattcctgccaacgcgaatgccagtgctgcggcgaaggtagttgccaatttcctgctcagtcccgatgcgcaactgcgtaaagcagatcccgctgtctggggcgatccttctgttctcgatccgcaaaaactgcctgacgggcagcgcgaaagtttgcaaagtagaatgccgcaggatctgccgccggtactggctgaaccgcacgcaggttgggtaaatgcgctggaacaagaatggctacaccgttacggtacgcattaatctttttgctgtgggcgatggtggcggtgatttatgcaccgctgatcccggcagctctcacgctgataagccctgctttgagcttgacacactggcaggcgttatttgccgatccacagttaccgcaggcattactggcaacgctggtgagcacaaccatcgcggcggtcggggcattgttgattgccctgctggtgattgtggcgctgtggcctgggccgaaatggcagcgtatgtgcgcccgtctgccgtggctgctcgccattccccatgtggcttttgccaccagcgcccttctgctctttgctgacggagggctgctttatgactatttcccgtatttcactccgccaatggaccgatttggcatcggtctgggcctcacccttgcagtgaaagaaagcgcatttctgctgtggatcttagcagcagtattgagcgaaaaatggctgttgcagcaggtcattgtgctggatagcctgggctacagccgctggcaatgcctgaactggctgctgttgccctccgtcgcgcctgcgctggcaatggcgatgctggcgattgttgcctggagcctgagcgtcgtggatgtggcaattattctcgggccaggtaatcccccgacgctggcggtaattagctggcagtggttaacccagggcgacattgaccaacaaacaaaaggcgcgcttgccagcctgctgttgatgctgttactcgccgcctacgttttgctgagctatctgctatggcgcagctggcggcgcactattccccgcgtagatggcgttcgcaagcctgccacgcctttattgccgggcaatacgctggcgatttttttacccttaaccggtgtgctgtgtgtggttctgctggcgatcctcgcggatcagagcacgatcaatagtgaagcgctcatcaacagcctgacaatggggctggtggcgacattcatcgctttgctcctgttactgctgtggctggaatgggggccacagcgtcgccagttgtggctatggttgcccattttattacctgctctgccactggtggcgggccagtacacgctggcgctatggctgaaactggatggaagctggacggcggtggtctgggggcatctgctgtgggtgatgccgtggatgctgtttatcctgcaacccgcctggcagcgcattgatagtcggttaattttgattgcgcaaacactgggctggagccgggccaaaatcttcttttacgtgaaatgcccactcatgttgcgccctgtgctgattgccttcgcggtgggatttgcagtcggtattgcgcagtatatgccaacgctgtggctgggcgcggggcgttttccgacgctcaccactgaggcggtggcattaagcagcggcggcagcaacggtattctcgccgcccaggctttatggcaactgctattaccgcttattatttttgccctgaccgcgttagtcgcaaaatgggtaggttatgtcagacaaggactccgctaatgctctgcgtgaaaaatgttagcctacgtttaccagaaagccgcttgctgacaaacgttaactttacggtggataaaggtgacattgtcacgttaatggggccgtctggctgtggaaaatccactctgtttagttggatgattggtgcactggccgaacagttttcttgtacaggtgagctatggctcaatgagcaacggattgacatcctacccaccgcacagcgtcagattggcattctttttcaggatgcactgttatttgaccagttcagtgtcgggcaaaatttactgctggcgctaccggcgacacttaaagggaatgcccgacgtaatgccgtgaatgatgcacttgagcgtagtggccttgagggagctttccatcaggatcctgccactttgtctggcggtcagcgagcgcgcgttgctctactacgcgcccttctcgcccaaccaaaagcgttactcctggatgagccattcagccgtcttgatgtggctctgcgcgataattttcgccagtgggtgttcagcgaagttcgcgccctggcgatccccgtcgttcaggtaacgcacgatctccaggatgttcctgctgatagttctgttctggatatggcgcagtggagtgaaaattacaacaaactgcgataacgcaaagtttttctcaatgcgtcagttcagaatggcgcactcaaaactacaatgtcgggattttcgatgaaacgtgtttctcaaatgaccgcgctggcaatggctttagggctggcttgcgcttctagctgggccgctgaactggcgaagcctcttacacttgaccagcttcaacaacaaaatggcaaagcgatagatactcgccccagcgcgttttataacggctggccacaaaccttaaatggcccttctggtcatgaacttgccgccttaaacctctctgccagctggcttgacaaaatgagcaccgaacagctcaacgcgtggatcaagcaacataacctgaaaaccgatgctccggtggcgctgtacggtaatgacaaagatgtcgacgccgtcaaaacgcgactgcaaaaagcaggtttaacgcatatctccatcctgagtgacgcgctaagcgaaccttcccgtctgcaaaaactgccgcattttgagcagctggtttatccgcaatggctgcacgacctgcaacaaggtaaagaggttacggcgaaacctgccggtgactggaaagtcattgaagcggcctggggcgctcctaagctttaccttatcagccatattcccggcgctgactacatcgataccaacgaagtggaaagtgaaccgctgtggaacaaagtttctgatgaacaactaaaagcgatgctggcaaaacacggcattcgccatgacaccacggtcattctgtatgggcgtgacgtatacgctgcagcgcgtgtggcgcagattatgctttatgctggtgtgaaagatgtgcgcctgctggatggcggctggcaaacctggtccgacgcgggactgcctgttgagcgcggaacgccaccgaaagtgaaagcggaaccggatttcggcgtgaagatcccggcacaaccgcagttgatgctcgatatggaacaggcccgtggactgctgcatcgccaggatgcaagcctggtgagcattcgtagctggccagaatttatcggtacgaccagcggttacagctatattaaaccaaaaggtgaaatagccggcgcacgttggggacacgctggtagcgacagcacgcatatggaagattttcataacccggatggcaccatgcgcagcgccgatgatattaccgctatgtggaaagcgtggaatatcaaaccagagcagcaagttagtttctactgcggcaccggctggcgcgcgtccgaaacctttatgtacgcacgcgccatgggttggaagaatgtttccgtgtatgacggcggctggtacgaatggagcagcgatccaaaaaatccggtagcaaccggtgaacgcggcccggacagtagcaaataacattgcaattactgacgctggaggctcttcagcgtcagatacccactccacacccgcgtaaaggtcgtcatccagcacaacgcaccgaagatccacgcaaaccacgcaaaccatgcagggaataaacatcccagcacaaacagtaagatcgtttctgtgccttcggttaatccccccagatagtaaaagctcttatgtgcataaccggggttatcaatctgatgttttgctgccagtgcagcaaaggcgagaaaactgctgcccgtgccgataaacgcaaacaacaaccagccgcctgccagcgcattttgctccggtgcagcaagaataaagccaaacggcaccagcgcgtaaaagagaaaatcgagagaaatatcaagaaagccgcccgcgtcggtaagctctctgcgccgcgccagcgcaccgtccagaccatcaagcagcctgttcaacaaaatgacgactagcgccgccagataccagcccagcgccagaaacggcagagccagcacgccgatggcaaatcccactaatgttaaaccatctggcgtaatgcccggtttatcaagaacccgcacgcactgatgcaacaacggtttaatccggggatgaagatggcggtctagcacaggcactccttaaatataaagcctttctgattgagcaacagtgcggatattatggcatttttcgcttatctgcccgtgtgtaatttatgaaaatgattgaagttgttgccgccatcattgaacgtgatggcaaaattttactcgcgcaacgccccgcccagagcgatcaggcgggattatgggagtttgccggtggtaaagtcgagccggatgaaagtcagcggcaggcgctggtgcgtgagttacgcgaagaactgggcatcgaagcaactgtgggtgaatatgttgccagccatcagcgagaagttagcgggcggattatccatcttcatgcctggcacgtacccgacttccacgggacgttacaggcacatgaacatcaggcgctggtctggtgcagtcctgaagaggcgctgcaatatccgctggcccctgctgacattccattattagaggcgtttatggctttacgcgccgccagaccagcggattaattatggctttacgcgccgccagaccagcggattagtgctaagggttttgtcatcacgctggcattgcagcagtattccttcggctttaattaccgccccttcagaataattttgatcctgataaacgcagcactgagtacagggctgcgcactctgcccgccactactgaacacttctggcggtacgtttacctccacgtccggacgataatgcgggttagccagtgcaattaatggaaatgctaatactacggcgaacaatgctcgactcacagggaactccttaacgttattgtctctgctactgataacggtagccgggtggcaaaactttagcgtctgagttatcgcatttggttatgagattactctcgttattaatttgctttcctgggtcatttttttcttgcttaccgtcacattcttgatggtatagtcgaaaactgcaaaagcacatgacataaacaacataagcacaatcgtattaatatataagggttttatatctatggatcagacatattctctggagagtttcctcaaccatgtccaaaagcgcgacccgaatcaaaccgagttcgcgcaagccgttcgtgaagtaatgaccacactctggccttttcttgaacaaaatccaaaatatcgccagatgagtttactggagcgtctggttgaaccggagcgcgtgatccagtttcgcgtggtatgggttgatgatcgcaaccagatacaggtcaaccgtgcatggcgtgtgcagttcagctctgccatcggcccgtacaaaggcggtatgcgcttccatccgagtgttaacctttccattctcaaattcctcggctttgaacaaaccttcaaaaatgccctgactactctgccgatgggcggtggtaaaggcggcagcgatttcgatccgaaaggaaaaagcgaaggtgaagtgatgcgtttttgccaggcgctgatgactgaactgtatcgccacctgggcgcggataccgacgttccggcaggtgatatcggggttggtggtcgtgaagtcggctttatggcggggatgatgaaaaagctctccaacaataccgcctgcgtcttcaccggtaagggccttagttttggcggcagtcttattcgcccggaagctaccggctacggtctggtttatttcacagaagcaatgctaaaacgccacggtatgggttttgaagggatgcgcgtttccgtttctggctccggcaacgtcgcccagtacgctatcgaaaaagcgatggaatttggtgctcgtgtgatcactgcgagtgactccagcggcactgtagttgatgaaagcggattcacgaaagagaaactggcacgtcttatcgaaatcaaagccagccgcgatggtcgagtggcagattacgccaaagaatttggtctggtctatctcgaaggccaacagccgtggtctctaccggttgatatcgccctgccttgcgccacccagaatgaactggatgttgacgccgcgcatcagcttatcgctaatggcgttaaagccgtcgccgaaggggcaaatatgccgaccaccatcgaagcgactgaactgttccagcaggcaggcgtactatttgcaccgggtaaagcggctaatgctggtggcgtcgctacaagcggcctggaaatggcacaaaacgctgcgcgcctgggctggaaagccgagaaagttgacgcacgtttgcatcacatcatgctggatatccaccatgcctgtgttgagcatggtggtgaaggtgagcaaaccaactacgtgcagggcgcgaacattgccggttttgtgaaggttgccgatgcgatgctggcgcagggtgtgatttaagttgtaaatgcctgatggcgctacgcttatcaggcctacaaatgggcacaattcattgcagttacgctctaatgtaggccgggcaagcgcagcgcccccggcaaaatttcaggcgtttaactgtatttaacggaacttgctccccacggaacatttcttatgggccaacggcatttcttactgtagtgctcccaaaactgcttgtcgtaacgataacacgcttcaagttcagcatccgttaactttctgcgatagcagcagatatgccagtaaagaaatcccatttgactatttttttgataatcttcttcgctttcgaacaactcgtgcgcctttcgagaagcaagcattatataatgccaggccagttcttcttcaattgtcccgttttgaaaagctgtgctacttatgctgatcatccaacttaattccgccgcccatattagcttcgcgctggatttaccggagctatgattagcgcaatcagagatatagtcactgggaaaaacagcaaatttattcaacaaggcgataacctgctctggggcttcctccatgtttgctttaaaggtattggctccatggtcgccagaaagaaaatgctccattaaggcacaataactttcgctatcttcgataccccattgatcctctaaagactcgcgtcttttacttatgatatcgatgctgtcaaaaggaagcacatgatattggaaggtatctttgccaggttcaggctttcgcggccagaactccagcgtttcagaccattgcttatgatagaatcgataaggtgcgatcaattgtagcgcctgtaacttctcgatactgagcggctcaatacctttagcctgataataatgcagttgttctttttttgctttaaaaccggcccgaacaataagccccatcataattaatagataaagaaaagagcatcccgcggtaatcaggcctctttcattcaaaccgttggatgttatcgctgcgaacacaaacattacagcgacaacacatgttaaataaaacccccacttacaaagcagcatggccttattttctttaatcatccgttcaaaattactattaaatatttcccagccattaaaagaatacttctcgctcccaggatggttttgtaataaaacttttttcatcacattccctgttattacatactttagaggcgataattttatccatgcaaaaaaaatatccaacgaattttcttgatccgctggatatttcagaatatgactcgaatagcacgaaagattcactcgcttacgctatcgccccgcttccgacttcatctgctggcggactttttttcgcactacgtttacgcggtgcagcctttttcttatcagcactgccaccactgcccggagccacaatgccgcgaaactgccgcaccggcgtacgtttggcttgatcaataagctgatatagcgtccccaccagcggctgcataaagtcctgatagcgacactgcttttcgctgatttgcgtcagcacgctttcccagtgcgcggtcatgtccggtcgcgtcgccatctccggcaggctatggaatagcgcttttccggcgtcggtggagtggatatagcgcccttttttggtcaggaaaccacgcttgaacaacagttcaataatcccggcacgcgttgcctctgtccccagaccatcggtcgcacggaggatctttttcagatctttatcctgcacaaagcgcgcgatcccggtcatcgcgctaagcagtgttgcatcggtaaaatggcgcggcggctgggtttgccgctctaccacttcacctttttcacacagcaactcatcgcctttcgccaccacaggcagtggcgtgccgtcgttttcttcatcgcgctctttgctgcctaacagcgtgcgccagcctgcttcagcaagaaaacgcgctttagcgacaaatttgcctttggcaatgtccagttcgataacacacttgcggaacaccgcatccgggcagaattgcatcagatactgacgggcaatcaggttatagaccttcgcttcgttctccgtcaggttgatcgcagaactccgtgcggtcggaatgatggcgtggtgcgcatcgacctttttgtcatcccaacagcggttgcgtatatctggatctaccactggctgcggcaacagatccggtgcatgaacactgatggcattcatcaccgcgtggcgtccggcaaaatgttcttctggcaaatagcgacaatcagaacgcggataagtgattagcttgtgcgtttcgtacagtttctggcagatatcaagcacgttctgcgcactcagaccaaaacgttttgccgcttcaatctgcaacgcactaaggctaaaaggcagcggcgcggattcactttcccgtttatcgttatagctggtgacaatagccggttgaccactaatgcggttaaccacatgctccgccagtggacgatgtaacaagcgcccttcttcatcctggtacggttcacacgcttcgctcggttgccagatagcggtaaaccgctcatcggcaggtgtcacgatatgtgctttgacttcaaagaagtctttcgccacgaagttttcaatctcttcatcgcggcgcaccaccagcccaagcacgggcgtctgcacgcgtcccacggaaagtacgccctgataaccggcattgcgaccgagaatggtatacgcacgggtcatattgatgccgtacagccagtcggcacgcgctcgcgccagcgcagaaacgcacagcggtacaaactcactgttggaacgaagacggtcgatcgcccgctcaaccgcctgcgggttcaggtcgtttatcaagcaacgctgtacctgctggcgcttttccggtgccagttgcagatagtccagcacttcatccaccagcaattgcccttcacgatccgggtccccggcgtgaacgatttcgctggcttcatgcaggaaccgtttgatgacgttaagttgtttggtcacggagggtcggggctgtaattgccacttttccgggacaatcggcaaatccgcaagattccagcgcgcatagcggctgtcgtaggcgtctggctgcgcctgctcaagcaggtgaccgatacaccaggtcaccacctgaccattaccgcactcgataaagccatcgcctttccggtgcggtttgggcaggacatcagcaatggcgcgcgccagactcggtttttcggcaataaacaaccgcattgaattaacgaatctcaaccatggcacgaccgccgcgcgctggcaccagttcgccaattgccgtcagttcaatgccaaactcggcggctgtagctttgacctcattttctgcttccggcatgaccgccagcagcaaaccgccagaagtttgcggatcacacagcagatcgcgcacttcacgcggcatttcacccatcagatgaccgtagctggcaaagttacgttcagtgccgccaggtactgcgcccaacttaatgtactcttcaacaccggggagtttcgggatcgcttcatagtcgacgcgtgcctgcacaccagccccctgacacatttcgctcaagtggcccagcagaccaaagcccgtaacgtcggtcatcgcttttacgccttcgatgttggcaaaggacgcgcctgcgatgttcatccggcacatcacttccgtcgccagtccctgatgttctggtttcaacagactttttttctcagccgtggtaagaacgccgatccccagcggtttcgtcaggaacagtttgcatccggcttgtgcggtactgtttttcttcacccgctcggtcggtacgatccccgttaccgccagaccaaaaatcggctccggcgcatcgatggagtgaccgccagccagcgcaatacccgcctgacgacatgcatagcgtccaccttcggtcacttcgcgggcaatttctggggaaagtttgttaatcggccagccgaggatcgcaatcgccataatcggtttgccccccatcgcgaagatatcgctgatggcgttagtcgccgcaatgcggccaaaatcgaaaggattatcaacgatcggcataaagaagtcggtggtactgataacgctggtgccattgcccagatcgtacaccgccgcatcgtcgcgggtttcattacccacaagcaaattcggatcaacaaacttcgcctgctcactatgcaggatggtttccaacacttttggggaaattttacagccgcaaccagctccgtggctgtattgggtcaaacgaatgctgttctcgctcatggacatctcctgtcaatgcaatccgggtatggtaaccctcattccgtgaagtgataagtgagagtgtctgaattcctgcgcctttgctcacaatccagacagtttcgcgacaattatcagaaataagttacaaacggcgtcgggtccgggacgttaatgctcgtagatgctttcagctgcggcgtaccgaggtagagaaaaccgacaattttatcctgctcacggcaaccgaatgcttcacgcactaccggactttcagttaatgcgccactgcgccagatgccgccaaacccctgggcaactgctgccatttgcatcgccatgaccgcgcatccggcagacatttcctgttcccagcgcgggactttatgattctcttcgcatttcgccaccaccgtgatgatgagcggtgcgcggaacggcgcattacgggctttgtcgatagctttgtcatcactaccggcagcaatcgccccctgttccagtacggcgctgaaacgctcgcgcccttccccttcaatcacaaaaaaatgccacggttgcatggacttatggtccggcgcacgcatacccgcacgcaggatgttttgcagttgttcacccgttggcgcgggttcagccaagcgggaggcgctacggcgattgatcaatagttcgagtgcatccatttgattaactcctgtcgtgatatttattcacaaaattaacacgagagtggattttgttacagcacagtccgcaattcctgctgacaagtaccggttgggtcattacgataaccacatctattgcgcctgtgacaggtgtgaccttaagttgggagaatacatgcgaaccctttggcgatttattgccggattttttaaatggacgtggcgtctgctgaatttcgtccgtgaaatggtacttaacctgttctttattttcctcgtactggttggtgtggggatttggatgcaggtcagtggtggtgatagcaaagaaacggccagtcgtggcgcactgctgctggacatttctggtgtgatcgtcgataaacccgacagttctcagcggtttagtaaattaagccgccagctgcttggtgccagttccgatcgtctgcaggaaaacagtctgtttgatatcgtcaacactattcgccaggcgaaggacgaccgcaatatcaccggtattgtgatggatctgaaaaacttcgcaggcggcgaccaaccgtctatgcagtacatcggcaaagctctgaaagagtttcgtgacagcgggaaaccggtttatgccgttggcgagaactacagccaggggcaatattatctcgccagtttcgccaataaaatttggctgtctccgcaaggcgtggttgatctgcacggctttgccaccaacggtctgtactacaaaagcttgctggataagctgaaagtttccacccatgtgttccgcgtgggtacgtataaatctgccgttgaaccgtttattcgtgatgatatgagtccggcagcccgcgaagctgacagccgctggattggtgagctgtggcaaaactatctgaatactgttgccgctaaccggcagatccctgctgagcaggtattccctggcgcgcaagggttgcttgagggtttaaccaaaaccggtggcgataccgcgaaatatgcactggaaaacaagctggtcgatgcactggcaagcagtgcggaaatcgaaaaagcactgaccaaagaattcggctggagtaagactgataaaaattatcgcgccatcagttattacgattacgcattgaaaacgccggcagataccggtgacagcatcggtgtcgtctttgctaatggcgcaattatggatggcgaggaaactcaggggaatgttggcggtgataccactgcggcacaaatccgcgacgctcgccttgacccgaaagtgaaagcgattgtcctgcgtgttaatagcccaggcggcagcgttaccgcgtctgaagtgattcgcgctgaactggcagcagcccgggcagcgggtaagcctgtggttgtaagcatgggcggcatggcggcatctggtggttactggatttccacgccagctaattacattgtggctaaccccagcaccctgaccggttctatcggtatcttcggcgtgatcaccaccgtagaaaatagtctggatagcattggtgttcatactgatggtgtcagtactagtccgctggcggatgtttctatcaccagggcactgccgccggaagcgcagctgatgatgcagttaagcattgagaatggctataaacgctttatcacgctggttgctgatgcgcgtcatagcacgccggagcagattgataaaattgcccagggccacgtctggaccggtcaggatgcaaaagctaacgggctggtcgatagtctcggggatttcgatgatgcggtcgccaaagcagcagagctggcaaaagtgaaacagtggcatctggaatattacgttgatgaaccgaccttcttcgacaaagtgatggacaacatgtctggttctgtccgggcaatgttgccagatgcgttccaggccatgttacctgcaccgctggccagcgtagcctctaccgttaaaagtgaaagtgacaagctggccgcgtttaatgacccacaaaaccgttatgcgttttgcctgacctgcgccaacatgcgttaagtcttgtactgagtggccgacagatcgtcggccacattattttttacgtcgacgaatcctcttcccgctgtttcgccccatatttccttatccgcatagtatcaggtgcgctccccctgcctcacgtatatacttttgctctttcgatatcattcatatcaatatcatgcaaaagaaaagtatttacgttgcctacacgggcgggaccatcgggatgcagcgttccgagcagggttatataccggtgagtggtcatctacaacgccaactggcgctgatgccggaattccatcgcccggagatgccagatttcaccattcatgaatatacgccgctgatggattctagtgatatgacgccggaagactggcagcatattgctgaagatattaaagcgcactatgacgactatgatggttttgtcattctgcacggcaccgacacgatggcgtataccgcctctgcgctgagcttcatgctcgagaatctcggtaaaccggtcattgtgacagggagtcaaatcccgctggctgagttacgctctgacggacaaattaatctgctgaatgcgttgtacgttgcggcgaattatccgatcaacgaagtaacgctctttttcaataaccgattgtatcgcggcaaccgcactaccaaagcccatgccgatggttttgatgcgtttgcctctccaaaccttcctccgttactggaagcaggtatccatattcgtcgtttgaatacgccacccgccccgcacggtgaaggggaattaatcgttcatccaatcaccccacaaccaattggcgtagtgacgatttatccagggatttctgctgacgtcgtgcgcaattttctgcgccaaccggtgaaagcattgattctgcgctcctatggcgtgggtaatgcgccacaaaacaaagccttcctgcaggaattacaagaagccagcgatcgcggtattgtggtggtcaacctgacacaatgtatgtccggtaaagtgaacatgggtggttatgccaccggtaacgccctcgcccatgccggcgtaattggcggtgcagatatgactgtagaagccacgctaaccaaactgcattacctgcttagccaggaactggatactgaaaccattcgcaaggccatgagccaaaacctgcgcggcgaactgacgccggatgattaaggagactgtaatgccccctcgcgccctgttactggtcgatttacaaaatgatttctgtgctggtggcgcgctcgccgtgccggaaggtgacagtacggtggatgtcgctaaccgcctgattgactggtgccagagccgcggtgaagcggttatcgccagtcaggactggcacccggcgaatcacggcagttttgccagtcagcacggtgtagagccttatacgccaggccaactcgacggtttgccacaaaccttctggccagatcactgtgtgcagaacagtgaaggcgcacaattacatccgttactgcaccaaaaagcgatcgcagcggtgttccataaaggcgaaaatcctttagttgacagttacagtgccttttttgataacggccgtcggcagaaaacctctctcgatgactggttacgcgatcatgaaatcgatgaattgatcgttatgggcctggctactgactattgcgtgaagtttaccgtgctggacgcgttacagttaggttataaggtaaacgtgattaccgatggttgtcgtggcgtgaatatccagccccaggacagtgcgcacgcgtttatggagatgagtgcagctggggcaacgctatatacgctggcagactgggaagagacacaggggtaattttacgctggcctacaattctgtactggcattgtaggccaaataaaacacgtcagtggcacatctggcaattgatgccatcaacgaaagatttaattcacctcagaaatctcttccaagctcaccttccgcgtttcgatgccaaaaatggagagaaccagcgcacagagcaataacataacaccaagtaccataaacaccgtgatgctcccataatgtgttaataatgccgcaacgccatagggcgtgaagactgcgacgatccgtccgacggcattaacgaaaccgctaccgcgcaggcgtaaatgcgttggccaaagctccgggatataaaccgcgctcgcgaagcaaacatacatgtataaaaagaagatcatcaccagtccatagattaaaatcgcccactctgtagtctgaatactatagatatagcctaacacggcaataataataagtaaggtggagccaaataaccgacgaggaaaatgatcaataattaatgccgcaataaatattcctaccggagcgccaatcataataacagcggtcattaatatacttttatcgacatcaatgccggagttaacaaatatggtcggtatccatacggtgatggtataaaggctaatgttcattgcaattaaaacagtaatcgcgactaatgtacgtcgtaacatttcacctttaaacaggagccagaaagtacccttgattactttaaccttgctgttgctctgatagctagtaagcgggggtaaacgaatactcttctctctttcaatttgctgctctacttcacgaagttggcattctgcacctgcgatttgccctttccctgccagccatcgtgggctctcgataaagtatttaccactgagaaaccaggctaacagtatgccaataccacccagcagaaacattattcgccaactaaaaaaagcgataaccaccacgcctatcgccgcagacagcatggggctccagttaccaacaaaactgagccgcgcggaccattttccacgcaccgtcgcggggataaactccgtaaaactggcatagccaaccataatcagcgcccccattcctgttcccatcaggaagcgaaagaagatgagccagtacatatcagggacaaaagcggcccctgttgcagcaataccgacgatgagaagatttatgcgaaacgccctgcgccgcccaaagtagtcaccaataaacccaccagtaagactgccgatgaaataaccaaacattaatgcgctggtaaaggcggcattgaggaaattattactccatccattgcttaccagctttgctaagacgacattaccggagtaactcaaaaaccctgttaataacagactaaagcttataataccaaatatacgataatgaaaccgggccaaaggcaagcggtccagtcttgcgccaatttgatcatattgttccattaggtgcctcggatttgctaaaaaggtagcaattgcggcaaattcacttgccgcatctttatcatcattttatttcaaggcgcaggaacaaataatattgacaacgtgtgcttaaattaccacaccagctggatattattgtctttgcaaaatgctatccactctgcacccggacttttatcagttattatgtaattaatatgactaaaatcagctaactggacaaaagctttgcgatcaaacttagagtgatcaaccaataacgcaacttctgtcgcctgacggatcattgtctttttgatttcagcttccgcttcattagagtccagcgcgccgctgttaatatcaagacctttacaactcattaccatgatatcgacatgatagcgcctgatgatctctttagtaattcttccttgcagactaagtgtatttttgtttagttccccacccgtactaacgactttaatttcactctgagccagaacatgaatcgcttccgcgctgttggttagcaacgtcaggccactacggtcctgtaacaatttgagcaattccattacggtactactggaatcggctgccatggtggttttattgtcgataaagggtagtgccttgcgtgcaataagctgcttctcttcataaaagctactagcgcgcttataaaaatggatattctccgtcaacatcgctgtatttaaaacagcaccaccataggttctggtcaaaaagccttcatcttccagcttctcaagatcgcggcgaatggtttcttcggttacctgaaaaatcccactcaaattactgactgtcacctttttatcgttggcaaccatttgcttaattgcctgaatcctgtcttttgccgccacgattacacccctgtatctttttacatcacattagcgcgattatcgcataaccgatgtttactttcaaaataacctgtttgaatcacagattttcatcacagttttcacagaaacagaggtgaatcgtgttgagtatttaacgctccagggcctctgccatttccctcatcaatgttgcgtctgcatcgcttaagttgatattcagtgccgcgacattttcgcgtacctgttccggtgcagtagccccactaagaatggagattaaatcactctgttttaatatccacgccagtgccagagtgggaattgtgcactgataacgagcacaaagtggctgccactgttcaagcatatcaatcactttcagcatgttttcacgctggaaccagactttatttgcccgagcgccgcccggaacgtaatcacgagtgatggtgccggtcaacaatccctgctctagcggggaataaacctgaaccacaatgccattatcacgacatagtggcagcagttcgttttccattgcccggtcgaggatactgtatttcgcctgaataatatccagttcaccatattgcagatactcgcggatatggtcagcatcgacgttagcagcgcctatagcgcgaattttcccttcagactttaactcattaagcactgcgacagtttcagcgatcggcgtaaaaaatggcggcacgctctgccagtgcgtcatgtagatatcgatgtaatcaatacccagacgttgcaagctcgctgctacctcttcgcggatagattccggggaaaggtttttatacaactgccgatcgccaactttgttgaataaacttccttttcgttcccagacaatgccgcatttggtttctactacaacctgttcacggggcagtttttttaacgcctgaccgacgataacttcactattgccaaagttatatcctggcgcagtatcaatcagattaatgccacaacgatgggcttcaagaatcgtatcaatacatatttgccgatcgagatcgccattccatgcaggaccgccgccaatggcccatgtccccaaccccattcggctaagcgtaatatccgttgtgcctaaaggtatctttttcatttgccttcattatccttcgtattcttccagcaattgttcgaccagctttctgttttttacgccggtggtggcaccgacgcttagaacgctgatagccgccgttgcattggcaaagcgtgcgcattcacgcagatttttgccttctaacagtgccgcaataaaaccactagcaaagttatcgcccgcgccaatggtgtcgatggcggttattcctgcgaccgccggcaccttcatcgtcatgtcaccacgcttgataaagcagccgtctttacccgttttaatcaccaccgtttttacgccgcacgcaagaaagcagtcagcaatttcatccagtgtctctttcccggtgagtaattttgcctcggcaaaattaggaaacagataatcgacataactcaatgcttcgcaaatatcatccagcgtttcattcaaccgcggtttgatcatatcggcacagataatcatctgccgggctttagcttgcgtaaaaatttctgttagcgctttaccatccaatagtggactgttgaaaatactggccagacttaataatttcgcctgagaaaaccgcgcaaaatcaacatcgtcaatattcaatttccacagactgccattacggtttgtgacaaacgtccgctcgccatcctccgtcaccagtccaacgttaatagaggtatctatgctgacgtcctgcttcaggctttgaatatcaatattctctttgcggcaatggtcgagaataaattgccctgcggcatctttaccaatacgactcattaatgctgtgcgatggcccagacgagaaataattgttgcttcatttattgcatcacccccggtggtcattgcgattctttcaagaggataagaatccacatcaaagatatttttactgaccggttgcaatggaatatcaacaatagcggcacctatacaaataacgtcgagattatccatatcattattccgctttgccatcagaaccgaacagtttaattttttccaatgcccgttcttttacagctttacgtacttcacgttctaaatgcaggaaaggctgatcctggttttctttcactgcaaccattgcggcctgacagagctccgtatgaatgttgattttcgcgatacccaagctaattgcagttttaatgtcggcatcactgatcccgcttgcaccgtgcaaaaccagcggaacagaaacggcatcgcgtacgcgtttgacgacctcaaagttcaattgtggctcactcgtataaaccccatgctggttgccgatggcgacagccaaactatcacagcccgtacgttcaacaaattcagccgcctggtcaggatcggtatagtgatagcccgccagcgcttcctcataaacggtttcattaccgacatgccctaattccgcctctaccggaatacccagcggatggaagaaatcgacagcctctttggttaaacgaatattttcttcgaaatcaaacgcggaagcatcacgcattaaactattcataccatgagtccaggcgttatgaataatctccatactccgaccatgatcccaatgagttattaccggcaccgttgctttttgtgccatacttaccatcatgtgagagaaatcttcaaaactggtgttaccgacaaaacctgtaccaaaagaaataataaccggggatttcgcttcttcggctgcgtcgataacgcccatcaacatttctgcattccatacgttaaaatgggcaattgcataatgtttatttgtggcatcgttttcccaatatctgatatctgcgagcatgttctgttctcccgtattaattaatcgctaattttaataacgcctttaataatgtcgcgtttgttgttaacactctcttcaaatgcctgttgtacatcccgataatcgtaaatatgcgtcaccatgcttttcacatcgaatcgcccactagaaatagcttcaatcgtgaccggataacgattggcatagcggaataccgtctggatagtgacttcgcgattgattttgaggaaattgattgcgctatcgccgggtacagtaccaacaatcataattttaccgccgcgcattaccagataaggtgcctgtttaacggtgaccgcagaacccgctgtttcgaaaacaatatctgcgcccatgtcttcggtaaattgctgacagcgtgcaatagtgtcttcttttgcgccgttaataaccactgtcgcaccaagctgttccgccattgccagacgtttttccagcacatcaacgacggcaatttccgttgctcccaggcatttgcacgcttgcaacgtcatcaaaccaatacaacctgctcccagaataattatcttcttacccggtttaacatctgccagcatcgcggcatgcatcccgactgcggcaggctccaccagcgccccttccatcgtgtccatattgtcgggcagtttgtaagtaaagctctccggatgacacagatagtgcgttaatgcgccgcggtagttgggttgtgtcgccataaaatcaacgtccgggcagatgttatatttgccttccagacagtaacgacagtgaccgcaaggaacgccaggttcgatatttacccgatcccccggtttaaatttgcgcacgcggcttcccacagccacaaccgtcccggcgcattcatgacccaggccaatttcttgatttgggtctttaggcggaataaacgggccactttcaaaaccatgtacatcactaccacaaataccgacatattctactttaatcaaaacttcatcttctttaggcactggtatttctgcactaataattttcattgtgcccggcacctgcaatattgctttactatttttcattttgaatccacccgtattatttattggctactgcatcaatacttaaactttcaacggagacacctttggtttcgattccaatggtggcgatagcaattgcgacaataatactaaccgcccccagaagaataaagactcccgtaacgccataactactgagcagcactgcaacggcataaggtgcggcaataccactgattcgccctaccgcattcgccagaccggagccacggagtttggcctctgtcggccagatttcagggacatacactgcgctggcatagcaaacgtacatatagacgaaagtaatcaggaagaaaccaatcaacgttatgagcaacatactggtttgcagactatagatatatccgagcaccgcaatcaggattaatagccccacacccattgttttacgcggaattttatccatcaccagcatggcaataaaaataccaaatggcgcgccaaacatactcatggtatttaaaacaatgctgtcttttaaattaatcccctgggtcatgaatattgttggcaaccagttaattagtgtgtactgcacaacgttcatggcaatcagcacacaagagcctaatatcacgcgtttcagtaatactcctgtcagtaaggcactatacggcaccgcttgtggcgctttaccgtcatcagcaataaccacaggcggcaaaggtttacccgtctggcgtatgacgccttcttctatactccgcatgactttctcggcttcctgataccgtccgcggctttccagccagcgcggggattcaggaaagtagcgccaggccagcgccgtagcgataaggctcaatattgcagggataagcagttgtacccgccagttccactctgcactaatcagcggcgtgagtcccatcgctatcaaactacagagcggataactccagttgccaataaaggaaacccgactactccacgttccacgatttctaccgggcatatattcggtgaaaccagcaaacagcgtaaccagtaaagctcccagcccaactcccatcacaaaacggcaggcaataaggaaatccatattcggactgaaagcaccgacaaccatgctggcaatatgaatggcctcatagaggatgaacgcatttctgcgaccggttttgtcgccaatgatgccgcccaccagcgcaccgagaaacattccggcggtcgtgattgcactgaatgtggctgtggtggaattatctgtccagcccaacgctttcagctgcgcgaggatcaagccaccaacggcattactccagcagacaagcaagccaaacgcgacgatggcaaacatactactatgccagcggcaatccggtaagcgatccagccgtgcaccacaatgcggttttgttatctgttccatgcgataacgttccttcaggagagtggttattcatcaaagtcgtaagtcatgatcactttgattgcggttttatcgaccatcgcatcaaacccttcgcgccattggctcaggccgatacgatgcgtgatcatcggtttgactttgatagcgccgctggctaatagcctgatagcgttacgccaactggtggagtcataggccatatgcccaatgatgcttttgttccaggcggtaatgtcattaatgctgaaatcaagaggtttgaagcccattccaacgcgtaccacttccccgttcgggcggagcatttcgatggcttgtttcagtgcgatattggcaccggagcattcaatcaccagtcccagattgtctttgccacaaatttgctggcagcgcgccaccacatcttcggtagaaccatttactactgccgtcgcacccagttcttttgcaaccgggaagcggaccgccacatcttcttgcagaccaacgacgacgatatttaccgcccccataattcgcgccatttgtacggagaacagcccgagtgggccagtgccgatgacgaccacatcctgaccaggaaggaatttgctttgctgcgcgatggatttgtaggcattacagatagggtcaagtacggctgcgtcctcataatcaacaccatcagggatttcccacaacgcatgacgatgaattttgagaatttcaccaggaaccagacaatatttggaaaaaccaccgccccaggtattattatccagaccaaggtttactttttctgtacaacacagaaaatcaccttgttcacaggccggacaaacaccgcaaacgtgaccgctgttatcgcttacgacgcgttgccccactttccagtctttgactttttcaccaacctgcgcaatacaacctgcgaactcatggccgcggatagagttaaactcatcagaaccgctatcgacattgtagtgcttcatgtctgcgccgcagattgccgcggctttaatttcaatcactacatcttccgggccacacatgggttgtgggacatcaatcatcttgtagccgccaaaggccttgccaaaccgagccagtgctttcattgcgtcatcctctgtgtttagttttgcttagatggccatcatacttacccacatgatttttgaggtcaacattaaatctgtaaaacacagataatgatctgcgttttacaactcagatcacaattacgcagaaaatggctgggtctgttacaggttgatggaaggcggggcgcaaaaagagcaaattcgagagggattaccggccaaataggtctgagacttaagttcaggagaagtcattcaggtgtgaacgggacggcaagagatcggactgggacttagccaggtcatggcgagataattgagatgagtcgtggggtcattgttggctatccccttcatagccgaggcaaaaaggggatgaaccacttacttaaacatggcaataggctttgcactgataccaaaatcttcttttaactgctgtttgctcttcatgaccatctgaccatttgtgtcaattgtcatatgctgtgcttcgatattatggcgggcttgccacagcatcaccagttgcaggcagttctctttttgttcctcggtcaacgcaacgccatcaggccatttccccagttcaacggcggtgctcaaacgctggtatacctcaggcatcatgctgttgataatgtcatcaagattcataatttttccgctcctgtggaataagttgctgaatcgttttttcaaccgttgatttcttcgccgttttcgccatcggtaaagcgtaaagaggcagagttaacacaataacgttcgcccgttggctgcggcccgtcggggaagacatgccccagatgggcatcacagttaccgcaacgaatttctatgcgctgcattccatgactcaagtctttgatataacgaatggattcttcacttaccggttcgtagaaactgggccagccacagccggaatcatacttggtttgggaatgaaacagcggggcatcgcagatcaaacagtgatatacgccgtcacgcttgttatgcagtaaacgacccgtaaatggcggctctgtcccatgattctgcgtcacgtaaaactgcatctcggacaaattttttttcagttcttctgcgctaggtttattagccatttgctcacatctcactttaatcgtgctcacattacgtgactgattctaacaaaacattaacaccaactggcaaaattttgtcctaaacttgatctcgacgaaatggctgcacctaaatcgtgatgaaaatcacatttttatcgtaattgccctttaaaattcggggcgccgaccccatgtggtctcaagcccaaaggaagagtgaggcgagtcagtcgcgtaatgcttaggcacaggattgatttgtcgcaatgattgacacgattccgcttgacgctgcgtaaggtttttgtaattttacaggcaaccttttattcactaacaaatagctggtggaatatatgactatcaaagtaggtatcaacggttttggccgtatcggtcgcattgttttccgtgctgctcagaaacgttctgacatcgagatcgttgcaatcaacgacctgttagacgctgattacatggcatacatgctgaaatatgactccactcacggccgtttcgacggtaccgttgaagtgaaagacggtcatctgatcgttaacggtaaaaaaatccgtgttaccgctgaacgtgatccggctaacctgaaatgggacgaagttggtgttgacgttgtcgctgaagcaactggtctgttcctgactgacgaaactgctcgtaaacacatcaccgctggtgcgaagaaagtggttatgactggtccgtctaaagacaacactccgatgttcgttaaaggcgctaacttcgacaaatatgctggccaggacatcgtttccaacgcttcctgcaccaccaactgcctggctccgctggctaaagttatcaacgataacttcggcatcatcgaaggtctgatgaccaccgttcacgctactaccgctactcagaaaaccgttgatggcccgtctcacaaagactggcgcggcggccgcggcgcttcccagaacatcatcccgtcctctaccggtgctgctaaagctgtaggtaaagtactgccagaactgaatggcaaactgactggtatggcgttccgcgttccgaccccgaacgtatctgtagttgacctgaccgttcgtctggaaaaagctgcaacttacgagcagatcaaagctgccgttaaagctgctgctgaaggcgaaatgaaaggcgttctgggctacaccgaagatgacgtagtatctaccgatttcaacggcgaagtttgcacttccgtgttcgatgctaaagctggtatcgctctgaacgacaacttcgtgaaactggtatcctggtacgacaacgaaaccggttactccaacaaagttctggacctgatcgctcacatctccaaataagttgagatgacactgtgatctaaaaagagcgacttcggtcgctcttttttttacctgataaaatgaagttaaaggactgcgtcatgattaagaaaatttttgcccttccggtcatcgaacaaatctcccctgtcctctcccgtcgtaaactggatgaactggacctcattgtggtcgatcatccccaggtaaaagcctcttttgcattacagggcgcacaccttctcagctggaaacctgcgggtgaagaagaagttctgtggttgagcaacaacacaccgttcaaaaatggcgtcgctattcgcggtggcgtaccggtttgctggccgtggtttggtccggcggcacaacaaggtctgcctgcgcacggttttgcccgcaacctgccgtggacgctgaaaagtcatcatgaagatgctgatggcgtagcgctgacttttgaattgacgcaaagcgaagagacgaaaaaattctggccgcacgactttacgctgttagcgcatttccgcgtgggtaaaacttgtgaaatcgatcttgaaagtcatggcgaatttgaaaccacctctgccctgcatacctactttaacgtgggtgatatcgctaaggtaagcgtcagtgggctgggcgatcgcttcattgataaagtgaatgacgcgaaagaaaatgtactgaccgatggtattcagaccttccctgaccgtaccgatcgcgtgtatctgaatccacaagattgcagcgtgattaatgatgaagcgctgaatcgtattatcgccgtaggccaccagcatcatctgaacgttgtcggctggaacccgggaccggcgcttagtattagcatgggcgatatgccggatgatggctacaaaacatttgtttgtgtagaaacggcttacgctagtgaaacgcaaaaagtgaccaaagagaaacctgcacatctggcgcaatccattcgcgttgcgaaacgttaatttacgttaatgttgtgtgccgggtgcaatgcatccggcacacaacatcacaccatatccagcgcagtttttccttttggtgccggatatgccttatccagcatagctaattccgcactagaaagttcgacctcaagcacagccgcattttgttggacatgggcaatcgtggccgcttttggaatcgccatcacaccctgatgactgatcacccacgccaacaatacttgtgccgcgctgatattgtgagcatgtgcaatttcgttgactaccgcgttttttaacagtccattgcgcaaccgcccggcctgggctaacggactgtaagccatcaccggcatctgctgttgctggcaccaggggagtagatcgtactcaattcctcgactaccgagatggtaaagcacctgattagtggcacactgatttccccccggcagctgccagagttcctgcatatcagcataatcaaggttagaaacgccccagcggcggatttttccctgggcgatcaatttttccatcgctgcgacagtctcttcaaaagcgaaactgccagaccagtgtaataagtaaagatcgagataatcagtattgagacggcgtaaactggcttcgcatgcatttatcgctttttgcccgccagcattccacggatagactttagagacgagaaagaccttctctcgcagaccggttaatgcttccccaaccaccttttcggcaccgccatcggcatacatttcggcggtatcaatgagggttaaaccgagttcaatgcccgcgcgtagtgcagcaacttctgttttgcgctgactggcatcttcgcccatataccatgttccctgccctacggctggcagactgacatcgccactaaattgaatcattttttgttgcattgtttcctcccaggtattgcaccaccgtaatgcaaaacagggcgtgacgccctgtttttatgcacaaaatgccctggaaagatgcattatcagaatttgtaggtgatcccggtagaaatcaggccagtccaggatttatccaccatcgggctgtcagtaacttcatcagacagacgggtgtagcgtgcggtaccgtaaacactccagtcgccgaggaagttgtagctggcgctcagctccaggtaagggctccagctgtcgttcgggttatagccacgcagaccgctgcgagcggactctttgcggcttacgccataatagtattcgttctggttttcgctgttccactgcacaccaatacccggagtcacggtcaggccaccgttggtgtaacgatacaaccaggccatatcccagacgatgccgttgctgttatccagggtatcgccagccagggtggtacgcaggtaaccgtactgggtaaagtgagcataagacagaccagccatcatggtgctcttacggtcatccaggtgacgcatttggtgatcgccactgtctttcgctttgaagtaaagcgggctccagtaagcggtaatactaagtttatccgttgcgtcattccacaggtagtaaccaccacctaagccacggaaccagaagttatcgccttcatagttgattaccggtactgggtaaacatcggtatcgtaatctttatatgggtgttcaacgacacctacgcctgcgcccagggaaaatttaccttcagcgtgcgctacgcctgcagacgttgcgataagcactccaagtgccagaagtttgagtttggtcacaattaatcattccttaaacaaatgtttagcgggcgacaaagtttacccgtcaatacatcgaaacccaacctttttacgttttcattttttaaagtaactgtttaattttcctgacgcggatgacaccgcgcttacagccaaatgaatttagcgttactggcgagcctggtctttacattaattatgcaaaatttatggatgagttgttgatatgccattgaaattaagaaagccgtgcaggcaagttttccatttgccatctacgcttaattttgaaggtgtatcaccgggcacgttgttctcatcgtcgataaaatggcatgagagttgctgtgttttagcaagagacgtcgttcagtttacctcttccgggagcctctactattcatatgaacggctcttaacctgtgctaaaaaacgaaaggacggcataccatgaatatattcgatcactatcgccagcgatatgaagctgccaaggacgaagagttcacactgcaggagtttcttaccacttgtcggcaagatcgcagtgcttatgccaacgcggctgagcggctattgatggctatcggtgagcctgtcatggtcgatacagcccaggaacccagactttctcgactcttttctaaccgggtcattgcacgttatccggcgtttgaagagttttacggcatggaagacgcgattgaacagattgtctcttatctgaaacacgcggctcaggggctggaagagaagaaacaaatcctgtatctgctggggcctgtgggtgggggtaaaagtagccttgctgagcgactgaaaagtttaatgcagctcgtaccgatttatgtattgagcgcgaacggtgagcgtagcccggtcaacgatcatccgttctgtcttttcaatccgcaggaagatgcgcagattctggaaaaagagtatggcattcctcgccgttatctcggcaccatcatgagcccgtgggcggcaaaacgcctgcatgaatttggtggcgatatcactaagttccgggtagtgaaggtctggccgagtattctgcaacaaattgctatcgccaaaacggaacccggcgatgagaacaaccaggacatctccgcgctggttgggaaagtcgatattcgtaaactcgaacactacgcgcagaatgacccggacgcctacggctattccggtgcgctgtgccgcgccaatcaggggatcatggaattcgttgagatgtttaaagcaccgattaaagtgctgcatcccttgttaaccgccactcaggaaggtaactacaacgggacggaaggtatctccgccctgccgttcaacgggattattctcgcacacagcaacgagtccgaatgggtcactttccgtaataacaaaaacaacgaagccttcctcgatcgtgtttacatcgtgaaggtgccgtattgcttgcgcatttccgaagagatcaaaatctacgagaaattgcttaatcacagtgaattgactcacgccccatgcgcccctggcacgctcgaaacactgagtcgtttttccattcttagccgcctgaaagagccagaaaactccagcatttatagtaagatgcgggtttatgatggcgaaagtctgaaagacaccgatcccaaagccaagagctatcaggaatatcgtgactacgccggtgtcgatgaagggatgaacggtctgagcacgcgttttgcgtttaagatcctctcccgcgtgttcaacttcgatcatgtagaagtggcagcaaacccggtccatctgttctacgtcctggaacagcagattgagcgcgagcagttcccacaagagcaggcagaacgctatctggagttcctgaaaggttatctgatcccgaaatatgccgagtttatcggcaaagagatccagacggcctaccttgaatcctattccgaatatgggcaaaacattttcgaccgttatgttacctacgcggatttctggattcaggatcaggagtatcgcgatccggataccgggcagctgtttgaccgcgagtctcttaacgccgagctggagaaaatcgagaaaccggcggggatcagtaatccaaaagatttccgcaacgagattgttaacttcgtactgcgcgccagagcgaataacagcggacgcaatccgaactggaccagctatgaaaaactgcgcacggtcatcgagaagaaaatgttctccaataccgaggagctgttgccggttatcagctttaacgccaaaacgagtaccgacgagcagaagaaacacgacgactttgtcgaccgtatgatggaaaaaggctacacccgtaaacaggtgcgtttactgtgcgaatggtatttgcgcgtacgtaaaagctcttaacaaccctggcccggtacacatgttaccgggcctacaacgacagcgaaccgtgggcctgagaagcggcaacacaggcgtagcatacagttggcaaatgtagtacggggggcatatgacctggtttattgaccggcgtctgaacggcaaaaacaaaagcatggtgaatcgccagcgttttttacgccgttataaagcgcaaattaaacagagcatctccgaggccattaataagcgtagcgtgactgacgtcgacagcggcgaatccgtatccattcccacggaagatattagcgaaccgatgtttcatcaggggcgtggcggtctgcgccaccgcgtgcatccgggcaatgaccatttcgtccagaacgaccgaattgaacgtccccagggtggcggcggaggttccggcagtggtcagggccaggccagccaggatggtgaaggtcaggatgaatttgtctttcagattagcaaagatgagtatcttgatctgctctttgaagatttggccttaccgaatctgaaacaaaaccaacaacgccagctgaccgaatataaaacgcatcgggcgggttataccgctaacggcgttccggccaatatcagcgttgtgcgtagtttgcagaacagtctggcgcgacgcacagccatgacggcaggcaagcggcgggaacttcatgcactggaagagaatttggccatcatcagcaacagtgaacctgcgcaactgctggaagaggaacgtctgcgcaaagaaattgcagaattacgtgccaaaattgaacgcgtcccttttattgacaccttcgatttacgttacaagaactacgagaagcggcccgatccctccagccaggcagtgatgttttgcctgatggacgtttccggtagtatggatcaatccactaaagatatggctaagcgtttttatattctgctgtatctgttcctcagcagaacgtataagaacgtggaagtcgtatacatccgccatcatacccaggcgaaagaagtcgatgaacatgagtttttctacagccaggaaacaggcggcaccattgtttccagcgccctgaaactgatggatgaggtagtgaaagagcgttataacccggcacagtggaatatttacgctgcacaagcaagcgacggcgataactgggccgatgactctccgctttgccatgaaatcctggcgaaaaaattattacctgttgttcgttattacagctatatcgaaattacccgtcgtgcacatcagacattgtggcgagaatatgagcatctgcaatctactttcgacaactttgcgatgcagcacatccgcgaccaggatgatatttatccggtgttccgtgaactgtttcataaacaaaatgcaacagctaaaggctaaaactatcagccaggtcattatcgcctggctgatttttagcttactgtaaattatctcatttattacatacattagcttacaatcgctttaaatatgacagcataacctttacataatttagttccagaaaacaatcattcggaaaaatgattcagagtacacgtatttccatggggttattctttaaatattttttaagcttaacgaaaattgatcctggtcaaaactatatatctctgccaagtataaaatccagcactcacattgctctcctttttatggtttctatgggtacacaaaaattaaaagctcaaagcttttttattttcagtttattgctgacgttaattttattttgcattactaccttatataacgaaaacacaaatgtaaaactcatcccacagatgaattacctgatggttgttgtggctttgtttttccttaacgccgtcatttttcttttcatgttaatgaaatatttcactaacaaacaaattttaccaacactcattttaagccttgcatttttaagtggccttatctatttagttgaaaccattgtaattatccataaaccaattaacggcagtacactgatccagacaaagagcaatgatgtttctattttctatattttccgccaactcagttttatttgtttaaccagcctggcgctcttttgttatggaaaagacaacatccttgacaacaataagaaaaaaacgggaatcctgttgctggcgctgatcccttttttagtttttccccttctggcacacaatctgagcagttataacgctgactattctttgtatgtcgtcgattactgtccggacaaccatactgcgacctggggaatcaactatacaaaaatattggtttgtctgtgggcatttttactgttctttattatcatgcgcacacgattagccagcgaactatggccgttaatagcattattatgtctggcaagcctatgctgcaacttacttctactgactctggatgagtataattatactatctggtatatcagtcgcgggattgaagtttccagtaaactgtttgttgtgtcttttctgatttataacattttcaggagctgcaactctccagcaaactggcagttcatgatgtgctgaccaatatttataatcggcgctactttttcaacagcgtagagagtttattgagccgacctgttgttaaggacttctgtgtcatgctggttgatattaatcagttcaaacgcatcaatgcccaatggggacatcgtgtgggtgataaagtgctggttagtattgtcgatattatccagcaaagcatccgccccgatgatattttagcgcgactggagggtgaggtgtttggcttgctatttaccgaactcaatagtgcccaggcaaaaatcattgcggaacgtatgcgtaaaaatgtcgaactcctgaccggctttagtaacagatatgatgttcctgaacaaatgaccatcagtattggcacggtttttagtacgggtgacacgcgtaatatcagccttgtcatgacggaagcagataaagccttacgcgaagcgaaaagcgaggggggcaacaaagtgattattcatcatatttaagtgcaaaaatattcagagccatgctttttgcgtggcttttgcatacaatttattactattacccctaaatttcccctccccagcggcgcagagatgagtataattagcgcccctgtgccaggccgcaatcgaactttatctggttttctcgtttcactaaccgaaggagatgcgtataaagcttccgatgagcgtttatatgtcaataagcagaacaaaaacagccgttcatgataaccttctgtggttgtttgcttgtaatctcaggagcgtgaaatgactgaaatggctaaaggaagcgtgacgcatcagcggttaatcgctttattaagtcaagaaggtgctgacttccgcgtcgttacccatgaagcggtaggtaaatgtgaagcggtgagtgaaattcgtggcaccgctctaggccagggtgctaaggcactggtatgtaaagtcaaaggcaatggcgtaaatcaacatgttctggcgatcctcgcagccgatcaacaggccgatctgagccaactcgccagccatataggcggattacgcgctagcttggccagcccggcggaagtcgatgaactcacaggctgtgtcttcggcgcgatcccccctttcagcttccatccaaaactcaaactggttgccgaccctctactcttcgaacgatttgatgaaatcgccttcaatgcaggcatgctggataaatccgttattttgaaaaccgcggattatttgcgcattgcgcaaccagaactggtcaatttccgccgcactgcgtaattagccggtccgttcgataagaagaacggacaaaaccagtacaacagcaatggcaaaaaagctactcgtgataatcagtgtctcgacaaacatttgatcgttcatagcatgcccccgggagatagctgttttcacgttattgttagcgtgcacaaatggcagtttgatgacagttcgcctgattttttatgcaaaaaacgtaaagattttctacttccttcctgcagcaagcgtaaagtaagcaggcttattattttttggcaaggaaaccacgatgtttgatgtcactttgctgatcctgctcgggttagctgcgctgggctttatcagtcataacaccactgtcgccgttagtattctggtgttaatcattgtccgcgtcacaccgttaagcaccttttttccgtggattgaaaaacaggggctaagtatcgggataatcattctgacgattggcgttatggcccccatcgccagcgggacgctaccgcccagtaccttgattcacagctttctgaactggaaaagtctggtggcgattgcagtaggcgtgattgtctcctggctgggtgggcgcggcgtgacgttaatgggcagccagccgcaactggtcgccgggctgctggtaggcactgttttaggcgtagcgctgtttcgcggcgtaccggttgggccgcttattgccgcgggtctggttagcctgattgtggggaaacagtaattattgccgcgggtctggtttcgcactttgtggggaaacagtagttaatctcgcaatatatcggcctggcgtttgccccaggcctttcttaaacatagtaataaaggccgttgtactatcataccccagcgtatgagcaactttctgtacagtatcgcctttcactaatccctgaagcgccataatcagctgtaactgctgacgccactggcgaaaactcaaccccgtctcttttactatcagtcgggcaagattgcgttcactcatcgcaaaaaagccagcccattgccccaatgccccccactcgacaggccctttcgccatcatctccaccatcgtgcggattttaggatgagaagaaacgggcaggtgcagctgttgttgtggctgctgagggagttcatcaaacaggacctgaattaatctgcgggtcattggctcagcacgctgagtcgtcgtcctgtttgccagggttaaaattaattcccggcataaggggcttattttcaatgtgcaacatgttgtcggcattgtcactgcgctgggttcgataaacagaaaacagagttcagcattagctgttacttgattgctatgttccaccccgcccggtatccaaaccgcatattgtggcggcaccatccacaaagcattttccaccgtacaggtaattgcaccatgtagcgccagtatcagctgtcctttgcggtgctgatgtacaggactggttaactcatccgttccggcgtgaatacaaaatgcgaccgcggcttcatggtgtcggtcgggttcatagccattgagattcaacctgtgcatcattttgtccgaacttagcgataatttgtcattttagcttgattcaacataacaataaaaacggtaaggtacagcctcgtttgtaacaatgagaagcatatgacctgtagtactagtttaagcggcaaaaacaggattgtccttatcgctggcattctgatgattgccacaacattacgcgtcacctttaccggcgcagcaccgttactggatacgattcgttccgcttacagcctgacgacagcgcaaaccggcttattgaccaccctgccattattggcctttgcgctaatcagtcctttggctgccccggtagcgcgacgttttggtatggaacgtagcctgtttgccgcgttacttttgatctgtgctggtatcgcaattcgctctctccctagcccttacttattatttggcggtacagcggtcattggcggtgggattgcattaggcaatgtcttactgccaggattaattaaacgcgatttccctcattccgtcgccagacttaccggcgcatattccctgacaatgggagctgcagcggcactgggaagcgctatggtcgtgccgctggctttgaacggttttggctggcaaggcgcgttgctcatgctgatgtgttttcctctgctggctctttttttatggctgccacagtggcgaagtcaacaacatgcaaatttgagtaccagccgcgccttacatactcggggtatctggcgtagtccgcttgcctggcaggtcacattgtttcttgggatcaacagtctggtctattacgtgattattggctggcttccggcgatcctcatcagtcacggctatagcgaagcacaggcgggtagtctgcatggtttgctgcaactagccacagcagcacccggtttgctgatcccacttttcttacatcatgtgaaagatcagcgtggtattgcagcgttcgttgccttgatgtgcgcagtgggcgcggttgggctctgctttatgccagcgcacgcgatcacctggactctgcttttcggttttggttccggcgcaacaatgatactggggttgacgttcattggtctgcgggctagttctgcgcatcaggcggcggcactcagcgggatggcacaatccgtcgggtatttgttggcagcctgtgggccgccgctgatgggtaaaatacacgatgctaacggtaactggtctgtaccacttatgggtgttgccatacttagtctactgatggcgattttcggactttgcgccgggagagacaaagaaattcgctaatatccggtgctatagtgacgtaacaaatcatgcgtgaaagggagaacaaacacgatgaatattcagtgcaaacgcgtttatgatccggctgaacagagcgatggttatcgcatactggtcgaccgcctctggccgcgcggtatcaaaaaaaccgatttagcccttgatgagtgggataaagaaatcacgccgagtacggaactgcgcaaagcctttcacggcgaagtcgtcgattatgcaacctttcgcgagcaatatcttgcagaactggcgcaacacgagcaagaaggaaagcggctggcggacatcgccaaaaaacagccgctgaccctgctctacagtgcaaaaaacaccacgcagaaccatgcgctggtgctggccgactggctacgtagcttgtgattttagtacagcatccggcggttatttttcaccagccggatggtcacgccgccacaatgcccattcatcaatcgtttcaccgcccggtaatttgcaattgttgctgaccccttgcgctgtctgcactggaatgagcgtcccgcccttctgctggcaatagacgctcgccggatttgccataccaatctgcggcggtttaggtgcttctggctgagaaggggtactacaaccagccaggaccagcaagcaaggcagaacaaaactgataattttcatttattgatctcacatatttatccaagattagagtatcgcggtatcgttttgttttgcagcactatttttattacattcactcaaaacatattacgtcttgtttcatctttgttgatgatgttttatcatgcctgcaaagattaaataatcagcatttacccgccgtatcctggagttgttccgtgagtgatcagattatcgcccgcgtcagccaatcccttgccaaagaacagagtctggaaagtctggtccgacagcttctggagatgctggaaatggtcactgatatggaaagtacctacctgaccaaagtggatgtcgaagcgcgcctgcagcatattatgtttgcccgtaacagccagaaaatgtacatcccggagaattttaccgtcagctgggattacagcttatgcaaacgcgccattgatgaaaactgctttttcagcgatgaagtccccgaccgttggggtgactgtattgcggcacgcaatcttggcatcaccacatttctgagcacgccaattcacttaccggatggaagtttctatggcacgctttgcgccgccagcagtgagaagcgccagtggagtgaacgcgcggaacaggttttacagttattcgccggactgattgcacaatatattcaaaaagaggcactggttgaacagctgcgcgaagccaatgctgcgctgattgcgcaaagctataccgacagcttaaccgggctaccgaatcggcgggcgatttttgaaaatctgacgacactgttttccctcgcccggcatcttaaccataagataatgatcgcgtttatcgatctggataacttcaaattaatcaatgatcgttttggtcataatagtggcgatctgtttctcattcaggttggcgagcgccttaatacgctccagcaaaatggcgaagttattggtcgtctcggcggtgatgagtttttagttgttagtctaaacaacgagaatgcggatattagcagcctgcgagaacgcattcagcagcaaatacgtggagaatatcacttaggtgatgttgatttgtattatcccggtgccagtcttggcatagtagaagtcgatcctgaaacaaccgatgcagacagtgccctgcatgctgccgatattgcgatgtatcaggagaaaaaacacaaacagaaaacaccttttgtcgcgcatccagcgctacattcctgaggcgtattcacatccttttgattggtgataacatgcgaatcggtattatttttccggttgtaatcttcattacagcggtcgtatttttagcatggttttttattggcggctatgctgccccgggagcataaagatgaaaaaaacaacgattattatgatgggtgtggcgattattgtcgtactcggcactgagctgggatggtggtaacgtcacctctaaaaaatagcaaaggctgcctgtgtgcagcctttgtgcaatttaagcgttaacttttaatcttcctgtagataaatagcacgacaatcgcaccaataacggcaaccacgaagctgccaaaattgaagccatcgactttaccaaagccaaacagcgtgctgatccatccgccgactacggcaccgactatccccagcaggatagtcataaagaatccacctccatctttacctggcatgatccacttcgccagaataccggcaataagcccaaaaataatccaactcagaatgcccattgtttcctcacttatctgttttgcattagcgggttagtcgctgataaaaagcatagcacaacatcgggagggcaagatttgtgacgagcatcacggaggttttttttgcgatggcgcagaaattgcgccatcaacgatcagtgataattaccaaccacaaacatcatgttcgttttccgtgtcataagaacgtacggtattcaccagatcttttatcacttcagccgccacttctggcaccagcaaagtcatcggcgtctctgtttcataatcgacagaaacgccattgctgttattggtgacggtcacggtatacgttgctttgcccatgattcatttcccgttatgaatgactttccgttgttgcgcaccttccatcaggacttcaggagccacgaagaagtcaatgttgaaataagtatcgtcagtcatggcttcaatgttgtgccacttttctggagggaacaccgcaaactgccccgcttcgataaggatcacctgatcaggctctgcactgtgttcatcagcgtagccgagatatttgaccgccccatgcataacggaaaggcgtgggtaaacccccgggcgcgttcctttatcaagatgacgttcgaatattccggcaggtgcagtttgtttattccagaaaggcgtactgcgcgtatgaatataattctgtgggatttgaagcatccttttccctccttcggtgaatgcgctgaaaacggtttattccagccgtttcagggtacgcctgataatttgcattttaaataccatttattggttactttttagcaccatatcagcgaagaatcagggaggattatagatgggaagcccgcgacaacgcgggctgaaagcatcaggattgcagcgtcgccagtcgggcagcgaaacccacgaacatcaaaccaatcagactgttgccaactttagccagtttctttttggtacgtatgtactgcgtgacaaaagcaccagatataatcaggaagctcaaatagcagaaactcaccagttccagcgtcgccgccagaataaagaaactaattcccgtatgtggggcattaacatcgataaactgtacgaaaaagctcacatagaacaaaatggctttcggattagtcaggctcaaaattaacgcgcgtttaaaaatagcaccgtattggggctcatcggatttggcctcgctatttttacccttcagggtcgcgtaaagaattttactccccagatagagcaaataaaacgcaccaagataacgtacaatgttgaataatatcggggtggtcttaattaatgtcgccactccagcccatgccagaaacatcaataccgcatcgccaataaatacaccgcaggccgcaagataaccgcctttcataccgctactgacgctatttttgagtacaaacagggtatttggccctggcaccaacacaataaaaatggccccaaccagataggtccagtaattcagaaccccgtattcagcgaacacattaacctctttaattatctttcgatcatgcgcgattaaaggtgaatatgctaaccaatctgtagcggcttagaaaggagaaaatcaggttttaacctgatatcaacccgataattgaatcattaatcaggcatgctccagactaaaattcgggtagtgctcggcaaaatactggcgtaaaaattctaccgttatccgcactttcgcactcgtcgccagcctactaacataaacggcccagacgttcgctggctggtaatattccggtagcacttgcactaaatgaccactggcaatgttttcgctaacatcccaccaggaacgcagagcaatcccctgcccatcgagacaccactgatggacaatttctccatgattagagctcagtgggccggtgactttaatcgcatgggggccttctttattgcgtaattgccagacaccaaaaggatgatcgcgctctttaatgaccaggcacggcaatgcagaaagatcggttaaatgtttcggcgcgccatgttgcgcaataaattccgggctcgcgcagagaatacggtaattggtcgccagtttgcgggcgattaaattaggggcgatgtcatcgccaatgcgaatatcgagatcgacaccttcattgaccaaatcgaccagtcggtcttccacatcaaaacgtaattccagttgcggatacgccttcgccagcgctaataacgccggagccaccacctgtcgtccaaaaccaaagctgctgataatacgcagcatcccctgcggcacctgacgcacgtcagaaagttcgtccatcatctgaccgacatcctgcaaaatccgctgcgcccattcataaatccgctctccttcttcggtaatggtgacgcggcgggtggtgcggtgtaacaacaccacgtttagcgtttgctccagcaaggcgatgcgcttgctgacgaacgccggactaacgcccagttcttccgccacggcggcaaaaccagcccggcgagccaccagcataaagacgcgcaaatcattcagcagcggtaaattattcatgattcgtgttttatgtttcaccagttacggggattaattccttttcagtcaattataggatggtgatgttgtcaattttgatggtcaggaagtgagaacccaatgatgaaaacgatgcgtattgctgcgatcccgggagacgggattggcaaagaagtccttcctgaagggattcgcgtgttacaggctgccgctgagcgctggggcttcgccttgagttttgagcaaatggagtgggcgagctgcgagtattacagccatcacggtaaaatgatgccggacgactggcatgagcaacttagccgtttcgacgccatctattttggtgccgtcggctggccggataccgttccggaccatattagcttgtggggtagcctgctgaaatttcgtcgtgaattcgaccagtacgtcaacctgcgcccggttcgtctctttcctggcgttccctgcccgctggcgggaaaacagcctggcgacatcgatttttacgtggtcagggaaaacaccgaaggcgaatattccagcctcggcggtagagtgaatgaaggtacagagcatgaagtcgtcattcaggaaagcgtatttacccgccgtggtgtcgatcgcattttgcgttatgccttcgaacttgcgcaaagccgtccacgtaagacactaacttctgccactaaaagcaacggtttagccatcagcatgccgtactgggatgagcgagtggaagcaatggccgagaattacccggagatccgctgggacaagcagcatattgatattctctgcgcgcgttttgtgatgcagccggaacgattcgatgtggtggtggcgtccaatttgtttggcgatatcctttccgatcttggcccggcctgcaccggcaccattggcattgccccatccgccaacctgaatccggaacgcactttcccgagcctcttcgagcctgtccacggttccgcgccggatatctacgggaaaaatattgctaaccctatcgccacgatttgggccggggcaatgatgctcgattttctcggcaatggcgatgagcgtttccagcaagcgcataacggtattctggcagcaattgaagaagtgattgctcacgggccgaaaacacctgatatgaaaggcaatgccaccacgccacaggttgccgacgcgatttgcaaaattattttgcgttaaggtcaaaccagtttatttgaaccgcgtcactgacgcggtttttttattcgttctttgcagtaaataacctgcgtcatttcaccttttattgtttccgtttcgtgttttatggctttccgtattcttaattgtttaatttatgtaacatgcaaattttgttacgcgtacgttaggttccgccgtacaggtattggttttgctggcaatgggactggtgatttatttagccaccagtaaatacggcaatattcgtcttggcgaaggaaaaccggaatacagcacgctctcctggctgtttatgtttatttgtgccggtttaggttcttctacgctttattggggggttgctgaatgggcctattattatcaaacacctggattaaatatcgcaccgcgtagtcaacaggcactcgaatttagcgttccctactctttcttccactggggcatcagcgcctgggcaacttatacgctggccagtttaatcatggcttatcactttcatgtgcggaaaaacaaaggtctgagcctttccggcattattgctgctattaccggcgttcgcccgcaaggcccatggggaaaactggtcgatttgatgttcctgatcgccactgtcggcgcactgaccatttcccttgttgttaccgcagcaacctttacccgtgggctttccgcgctgaccggtttacccgataacttcaccgtgcaggcatttgtgatcctgctttccggcggcattttttgcctaagcagctggattggtatcaacaacggtttgcaacgtctgagcaaaatggttggctggggcgcgttcctgctgccattactggtgctgattgtcggcccaaccgaatttattaccaacagcatcatcaatgccatcggcctgaccacgcaaaacttcctgcaaatgagcttattcaccgatccgcttggcgatggtagttttacccgcaactggaccgttttctactggctgtggtggatcagttacacccctggcgtagcaatgtttgtcacccgcgtttcccgcggtcgtaagattaaagaagttatctggggactgatcctcggcagcaccgtcggttgctggttcttctttggcgtaatggaaagctatgccattcatcagtttatcaatggcgtaatcaacgtcccacaggtgctggaaacactgggcggcgaaacagctgtacagcaagttctgatgagcttgccagccggtaaattgttcctcgccgcatacctgggcgtgatgattattttccttgccagccatatggatgcagtggcctacaccatggcggcgaccagtacgcgtaatctccaggaaggtgacgatcctgaccgtgggctgcgtcttttctggtgcgtggtgatcactctgatcccgctttccatcttgtttaccggtgctagcctggaaacgatgaaaaccaccgtcgtgctcacagcccttcccttcctcgtcattttactggtgaaagtcggcgggtttattcgctggctgaaacaggattacgccgacattccggctcatcaagttgaacattatctcccgcagacaccggttgaagccctggaaaaaacgccagtgctccctgcgggaaccgtattcaaaggcgacaactgagcgccatcatcctaacgataaaggtatccctatgagcaatctgagccctgactttgtactacccgaaaatttttgcgctaacccgcaagaggcgtggaccattcctgcccgtttttataccgatcagaacgcgtttgaacacgaaaaagagaacgtcttcgccaaaagctggatttgcgtcgctcacagcagcgaactggcgaatgccaatgattatgtgacgcgtgagatcattggcgaaagcatcgtgctggtacgcggtcgtgataaggttttgcgcgcgttctataacgtgtgtccgcaccgtggtcatcagttgttgagcggtgaaggaaaagcaaaaaatgtgattacctgcccgtatcacgcatgggcattcaaactcgatggcaacctggcccatgcacgtaactgcgaaaacgtcgccaatttcgatagcgacaaagcgcaactggttccggtgcgtctggaagaatatgccggattcgtcttcatcaacatggaccccaacgccaccagcgtagaagatcaattacccggcctgggcgcgaaagtgctggaagcctgcccggaagtccacgatctgaaactggcggcccgctttaccacccgcacgcctgccaactggaagaacattgtcgataactatctcgagtgctatcactgtggtccggcgcatccaggtttctccgactccgtacaggttgatcgttactggcacaccatgcacggtaactggacgctgcaatacggtttcgccaaaccgtccgaacagagctttaaatttgaagagggtacggatgcggcattccacggtttctggctgtggccgtgcacgatgctgaacgtcaccccgatcaaagggatgatgacggtcatttatgaattcccggtggattctgaaactaccctgcaaaactacgatatttacttcaccaatgaagagttaaccgacgagcaaaaaagcctgattgagtggtatcgcgatgtgttccgtccggaagatttacgtctggttgaaagcgtacagaaagggctgaaaagccgtggctatcgtggtcaggggcgcatcatggccgacagtagcggtagtggcatttccgaacatggtatcgcccatttccataatctgctggcgcaggtgtttaaggactaatgacatcggcggcggtattttccgccgctgggctgatttttgatggagtacagcaatgagtgactatcaaatgtttgaagtacaggtgagccaggttgaaccccttaccgaacaggtgaaacgcttcacgctggtggcaaccgatggcaaaccattacctgcgtttaccggaggaagtcacgtcattgtgcagatgagcgatggtgataaccagtacagcaatgcgtatagtctactgagtagcccgcatgacacctcttgttatcagattgccgttcggctggaggaaaacagccgcggcggttcccgctttttgcatcagcaggtaaaagtgggcgatcggttaacgattagtacgcctaataacctgtttgcgctaattcccagtgccagaaagcatctgtttatcgcgggcggtattggtatcacccctttcctgagccacatggcagagctgcaacacagcgacgtcgactggcagctacattactgcagccgaaatccagaaagttgcgcatttcgtgatgagctagtccagcatccgcaggctgagaaagtccatttgcatcatagtagtaccggaacacgactggaattagcgcgattattggcggatatcgaacctggcacacacgtttatacctgtggccccgaggcgctaattgaagcggtaagaagtgaagctgcgcgtctggacatcgccgccgatacgctgcactttgagcaatttgctatcgaagacaaaaccggcgatgcatttaccctggtgcttgcccgttccggaaaagagtttgtggtgccggaagagatgactattttgcaggttattgaaaataataaagccgcgaaagtggaatgtttatgtcgtgaaggggtatgcggaacctgcgaaacagcaatactggaaggtgaagctgaccatcgggatcaatattttagcgatgaagagcgtgccagccagcaaagtatgttgatctgttgtagccgtgcgaagggtaaacgcctggtgttggatttgtaatttgccgaagccggatgtggcgctgagcgcgcccagtccggcttcggaagattttactgcggatattcctgcaataaattgtgtaatgcttccgccatcagctcaccacgccagccggaaatcagctccggcaaattgttctgcggtttcagtttccagtgccagttcagcagttggttgatttgccgacggcttgccagcaattcggcgctgatcttatgcgtttcgctcacgtcagtaatcaggctcttaatcgctttaaacgctttacgataacccggcatgtccatcaggttaagcatcggctgcggtaaggcatcttccggcaatgtctgcgctttttccaccagcgctagcagcgttttaccgtgaaagcggatttcgctaccggataaacccaggctgtccagttcgcctaaacttcccggcatataacgcgctacgctccacaaatgctcttcacgcacgacaaagttcaccgccagatcgcgctctcgcgccttgcgcagtcgccagtcggctaacagttgcagacaggccagttggcgtgtgcgtaattgccaggcattggtgatatcacgccaggcatcttccggcgcaacgacttcctgacgacgcatttgcatcaggcggcattcatccagcgccgcaggtagccagccggaggcctccgtttctaccataagcttggcggtgatcggtaacagataccagacatccgccgctgcgtattcacactgacgttcggtcagcggtctggccagccagtcggtgcggctttcactcttgtccagcgtaacgccggaatactcttccaccatggaagcgaaaccccaactcatcgggcgtccgcagaaggcagcaaggatttgcgtgtcaatcaagggttgtggtaattcgccaaagacattgaggaacacttccagatcttcactgcctgcatggagaaattttgtgatggacggatcgcgcaggatcgctttcagcggactccagtcggtgatcccgagtggatcgattagcgccagatgctcgccatcgaaaagttgaatcaaccccagctgcgggtaataagtgcgcgtacgaacaaattcagtatccagggctatcgccggaaaggcacggacggcttcacacaaagaagccagcgcatcgtccgtggtaatcatttggtaattcaaattgttttctctttagtgggcgtcaaaaaaaacgccggattaaccggcgtctgacgactgacttaacgctcaggctttattgtccactttgccgcgcgcttcgtcacgtaattctcgtcgcaaaatttttccgacgttagatttcggtaactcatcacgaaactccaccagcttcggtactttgtatcccgtgagctgacggcggcaaaaagtcaccagactctcttcggtaaggcttggatcttttttcactacgaagattttcaccgcttcaccactggagccggaaggtacgccaacagccgcgacttcctgtacgccaggatgctgcatgacgacatcttcaatctcgttgggatagacgttaaaaccggaaaccagaatcatgtcttttttacgatcgacaatgcgcaggaatccttcttcatccattaccgcgatgtcgccggtgtgtaaccagccatttttgatgatttcatcggtagcatcgggacgctgccagtaacccagcatcacctgcggtcctttgacacaaagctcacccggttgacctggtggtacttcattatcatcatcatccaccagtttggcttccgtgctcggcaccggcaaaccgatgctaccactatgataatcaatatcatatgggttaacgctgaccagcggcgcacactcggtaaggccatagccttccagcagatactgtccggtcagtttcacccaacgctctgccaccacttgctgcactggcatcccaccgcctgcggaaagatgcagactggagaaatccagctgctggaactctttattgttcagcaacgcattgaacaaggtgttaacgcccgtgatagcggtaaacggatatttcgctaactcttttaccaaccctggaatatcgcgcgggttagtgataagcaggttctgcccacccagttcgataaacagcaggcagttaatggtcagggcaaaaatgtgatacagcggcagcgccgtcaccaccagctctttgcccggatgcaacagcggaccataggtcgcgttaacctgttccaggttcgccagcatattgcggtgagtcagcatcgcgcctttcgccacaccagtggtgccgccggtgtattgcagaaaagctaaatcttccggcaccagttcgggtttgacgtactgcatccggtagccgttatgcagtgcgctacgaaaactaatggcatctggcagatggtatttcggcaccaaacgcttgatgtatttaacaacgaaattgactaccgtgccttttgccgtagatagctgatcgcccatacgggtcagaattacgtgctgaacggcggttttatcaaccactttttccagtgtgtgagcaaagttagacacgataacaatcgcgcttgcgccgctatcgttaagctgatgctcaagctcacgcggggtatacaacgggttaacgtttacgacgatcatcccggcacgcaaaatgccaaacagcgccaccggatattgcaataaattaggcatcatcaacgcaacgcgatcgcctttcttcagccccaacccttgttgcaaataagcggcaaacgcgcgactgcgttcttccagcttgcggaaggtcattacctcccccatattcacaaacgcaggttgatcggcgtagcgcgcgacgctctgctcaaacatatctaccagagattgataacggtcagggttgatctccgtcggaacgtccgcgggataacggttaagccaaaccttcttcaattcttcacctctaaaatgcgtgttcgtcgtcatcgcaaccccaaatgatatacatgccgttaacataatattaactcatcataccagcttgataattacccaacgaaaaggttgcgaagcgcgtcactatttatttttatctttaccgtaagaatgcagaaacagcggaccagccgctgtttctttttctttaaaaacaagcaattattcagttacaactgtttgtactctcgcggggccgggattataccagccccatccgccgtagccatagggccagccacgaccgccataaaaccatggatcaatcggctgaggcggcataatcacctgctgggttaaatgccaacgtttgtaacccgttacttgcatcaccataaatttatagggcgtattgccgattttgccgtcaaccgcaccagtgattggcccgactaccgtaaccagttgtccacggaaatccaccgggtccagaaaaccgttcacatcggcataaatgcgaccgcgagaaggttctcccagcgtcggtctggctccgctgtccagcggtacggtagcaatttccaggcgagttttcccttgctggttttgtaccgcaaccactttgccaccaaagcgtgcctcctgaccaacgtacagctgcggcgcactcatcacccgaactaaatcttgttgcggcgtgggactgctgcctttaatggcgtccggcacagtgacacaaccgctcagcattagcgcaaacgtacctgccagtatgcctttgataacattcttttgaaccgccatggtgcgactcctttttttctcagggcatactcttaagattcattctttgcccggaagtttcttccatgcgacgttgttacgtaaataaaccggttcggcatgttccaccgccaccgttttaccctcagcaaacatctgacacgcaatcggcagcatatcttcagcagcaggcagtaacacttcgccatcgcgcaaaaccagcccgctctctttaccgagatccggccaagcttgccagcccgtccctaccgtcacccattcgccggaaagctgttgcattcgttcatggacgatttcgggtttgagtacggcttcggtttcttcaccgtgccagataccgttttcatcacgctgatattcggcccagtaaacttcgcccattcgcgcgtcaatggctgccagcacgcgggttgcgccgtttttgcgccacgccccttgcgccatcgtcattagcgtggagacgccaatcatcggtaattccgcgccaagcgccagcccttgcgcgatgccaataccaatgcgcacgccagtaaagctaccggggccgcgcccgtaagccagagcgttaatatcagtcagggaagttccgctggtggtcaggatatcctgcaccatcggtaagattcgttgagtatgttcacgagggcaaagctcaaaatgagcgttgacagtaccgtcgttccacagggcgacagagcaggcctctgtcgcggtatcgatagccagaattcgcatgggtcttcgtgcttagatcaataaaaaggcgcgcatcataccatactccgtaacaaattacctggaggatggtatcgcaaggaaacgaaccgcacgggcaatgtcacgggtgcgtggcgcgggcggcagactggcgagaaacgtcgcgccgtaaggacgcatcaccagccgattgtcacaaatcaccagcacgccacgatcgtcggcgtcgcgaatcagtcgccctaccccctgtttgagagtaatgacggcatctggtagttgcacttcatcgaacgggtcgccaccgcgcaaacgacaatcttccatgcgcgcttttaacagtggatcatccgggctggtaaacggcaatttgtcgataattaccaaactcaatgtatcgccacgcacgtccaccccttcccagaaactgctggttgccacaagaagcgcattaccggcgctgacaaattgctgcaacagttgccctttgctggtttccccctgcaacaatacaggaagcgtcatggtagcgcggaactgctcggccagatcgcgcatcatggcgtggctggtacaaagcataaaacaacgaccgttgttagcttcgatgatcggtcgcagcattgccgctaactggcgagcagaacctggctggttggtttgcggcagattgcgcagcacacagagtaacgcctggcggctgtaatcaaatgggctgggcaacagcaagctctcggcctgttcgatgccaagccggctggtgaaatgatgcagatcgtcgttcacgctcagcgttgcactggtgaagatccagctaccgggtttttgcgccattaactctttgaatttatccgccacgctgagcggcgtgagagccagagtaaaatggcggctagtgcattcgtaccagtagctgtagcccggctgattgatctcttttagccgcttcagccgtgtgcgatacaacgtggcgcgctcaaatgccgcatccagcaaggcggaacgccccagactcagtttcgccacgtcataacaaagttccagggtgtcatcgagcagtaaaaatgcccgctgaatttgcggattagctaacagctcacgcaggttaccgcgataacctggctcaccgagttgcagacgaaaatcctgcgcactctgggcaagacgatcagcgcacttttgtaactgctgggtgtcttttaattcggtgcggtaggcgatggtgatgtcttttgccaggtcgagcagttgtcgactggagagactctgaccaaaatactggctggcaatgtccggtagctggtgggcttcgtcgaagatcatgacgtccgcttccgggatcagttcgccaaatccactctctttaaccaccatatccgccagaaagagatgatggtttaccaccaccacatcggcgtccatcgcttttttacgtgctttgaccacaaagcaatctttatacatcgggcagtcgctgccaagacagttgtcgttggtgctggtgaccagcggccacgcctgactatcttccgccacgctgacgcaggtgctgatatcaccatcgactgtttgattagaccaggagcgcagcaggatcacatcgcttaagatttgtaccggcagatcgccccccgccagcgcctgctgttcgagacgttcgaggcagaggtagttactgcgccctttcagcagcgccacgttgcccgtatatttcaatgccttactgactgttggcaaatcgcggctgtagagctgatcctgcaacgctttactgccggtgctgataatgactttctttttcgcccgcagcgcaggagccaggtaagcgtaggttttgcccgtaccggttcctgcttccaccaccagcggctggcctttttctatcgcctgggtgacggctaccgccatctgtcgctgtggttctcgcggcttaaagcctggtatcgctttcgccagctgaccgtctggtgcaaaatcgtccgtcacactaccccctgttgatttgaacagggattatgtcaggatgagggcgctttcgccagttgaagtggtgacggcgacctcacattgtggcagtctttgcagcacgaaaatggaagtataatgaggacaaaatgatgactatcgttcgtatcgatgctgaagcccgctggtctgatgtagtaatccacaacaacacgctctactacactggtgtaccggaaaacctcgacgccgatgcctttgagcaaaccgccaacacgctggcacagattgacgccgtgctggaaaaacagggcagcaataaaagcagcattctggatgccaccattttcctggccgataaaaacgacttcgcggcgatgaataaagcgtgggatgcttgggttgtcgcgggtcatgcgccggtgcgctgcacggtacaagcgggtttgatgaacccgaagtataaagttgaaattaagattgtggctgcggtgtaagctttatcgaagcaaaataagtcagacgataatttatcgataatactggtcggttttacataaatcgaccagagaataagatattactgttgatgcttctgctaattcattatttatatttataatttcaattttatctataaaactaactatataaataaacataaacatgccgttgtgttcgccctttgattagcaactctggttttctttcttagctgaacaatctggttatagcgtgcggactgaccgttaaatttctccatcttactggataacacaccatgagctgctacctttaaaacacctgaatgtcaacaggttaactcgtgccatatcgttataatccctttgatattagatgcaaattaaggtcatatatagccttatcgataacatggttaattttaaggataagaatatgcctgctgtaatagataaagccctggatttcattggtgccatggatgtaagtgcgccaacaccaagtagcatgaatgaaagcacggcgaagggaatctttaaatatttaaaagaactgggagtacccgcgagtgccgctgatattacggcgcgagctgaccaggaaggctggaaccctgggttcacggaaaaaatggttggatgggcaaaaaaaatggagacaggtgaacgttctgtgattaaaaatcctgaatactttagtacatatatgcaggaagaactaaaagcactggtctgagttaaatttatatcagcataaatgggtcaggacgcttttaatcacatataaaaagcgtcctttttctcacaatcaaatgatcatcggcttctataacgaaatcgatacggattagtgtgttactcgtcttcatcctcaaaacgcgccacgattcgctcgccggagtggttggcacgcagctcttctgccaccagcgcgattgcctggccgctgctcatcccttgtgccatcagttcctggatccgctcgacagctttttgctgctgttcatgggtgagactaggtaaacctgcaaacattgttaactcctgctaaattgttggcgctaattatttcatgctacccggcacatagccagtagagtcaggactgatgaagacgttatctcccgctgtgattactttactctggcgtcaggacgccgctgaattttatttctcccgcttaagccacctgccgtgggcgatgcttttacactccggctatgccgatcatccgtatagccgctttgatattgtggtcgccgagccgatttgcactttaaccactttcggtaaagaaaccgttgttagtgaaagcgaaaaacgcacaacgaccactgatgacccgctacaggtgctccagcaggtgctggatcgcgcagacattcgcccaacgcataacgaagatttgccatttcagggcggcgcactggggttgtttggctacgatctgggccgccgttttgagagtctgccagaaattgcggaacaagatatcgttctgccggatatggcagtgggtatctacgattgggcgctcattgtcgaccaccagcgtcatacagtttctttgctgagtcataatgatgtcaatgcccgtcgggcctggctggaaagccagcaattcagcccgcaggaagatttcacgctcacttccgactggcaatccaatatgacccgcgagcagtacggcgaaaaatttcgccaggtacaggaatatctgcacagcggtgattgctatcaggtgaatctcgcccaacgttttcatgcgacctattctggcgatgaatggcaggcattccttcagcttaatcaggccaaccgcgcgccatttagcgcttttttacgtcttgaacagggtgcaattttaagccttagcccagagcggtttattctttgtgataatagtgaaatccagacccgcccgattaaaggcacgctaccacgcctgcccgatcctcaggaagatagcaaacaagcagtaaaactggcgaacagtgcgaaagatcgtgccgaaaatctgatgattgtcgatttaatgcgtaatgatatcggtcgtgttgccgtagcaggtagcgtaaaagtaccagagctgttcgtggtggaacccttccctgccgtgcatcatctggtcagcaccataacggcgcaactaccagaacagttacacgccagcgatctgctgcgcgcagcttttcctggtggcagtataaccggggctccgaaagtacgggctatggaaattatcgacgaactggaaccgcagcgacgcaatgcctggtgcggcagcattggctatttgagcttttgcggcaacatggataccagtattactatccgcacgctgactgccattaacggacaaattttctgctctgcgggcggtggaattgtcgccgatagccaggaagaagcggaatatcaggaaacttttgataaagttaatcgtatcctgaagcaactggagaagtaagacgtggaataccgtagcctgacgcttgatgattttttaagccgctttcaacttttgcgcccgcaaattaaccgggaaaccctaaatcatcgtcaggctgctgtgttaatccccatcgtccgtcgaccgcaaccggggttgttgctgactcagcgtagcattcatctgcgtaaacacgctggacaagtggcattccctggaggtgcagtcgatgacacggacgcaagtgctatcgccgccgcgctgcgcgaagctgaagaagaggtcgctataccgccttccgccgttgaagttatcggcgtgctgccgcccgtcgatagcgtcactggctaccaggtaaccccagtggtcggcattatcccgcccgatctgccgtatcgcgccagtgaagatgaagtcagcgcggtgtttgaaatgccgctcgcccaggcattacatctgggtcgttatcaccctttagatatctaccgccgtggtgatagtcatcgggtatggctgtcctggtacgaacagtattttgtatggggaatgaccgcaggcataattcgtgagctggcgctgcaaattggtgtgaaaccctgactatacttatctttacatctacaaaacactacttgagacaatcatcgcaatattagttaaatcgcggtttttgattagtttaattcatgtgaatagttaagccagtcgccgcgttccctcttacactatgcgctgttattagttcgttactggaagtccagtcaccttgtcaggagtattatcgtgattagtctattcgacatgtttaaggtggggattggtcccagttcttcccataccgtagggcctatgaaggcaggtaaacagttcgtcgatgatctggtcgaaaaaggcttactggatagcgttactcgcgttgccgtggacgtttatggtagtctgagcctgacgggtaaaggccaccacaccgatatcgccattattatgggtcttgcaggtaacgaacctgccaccgtggatatcgacagtattcccggttttattcgcgacgtagaagagcgcgaacgtctgctgctggcacagggacggcatgaagtggatttcccgcgcgacaacgggatgcgttttcataacggcaacctgccgctgcatgaaaacggtatgcaaatccacgcctataacggcgatgaagtcgtctacagcaaaacttattattccatcggcggcggttttatcgtcgatgaagaacactttggtcaggatgctgccaacgaagtaagcgtgccgtatccgttcaaatctgccaccgaactgctcgcgtactgtaatgaaaccggctatagcctgtctggtctcgctatgcagaacgaactggcgctgcacagcaagaaagagatcgacgagtatttcgcgcatgtctggcaaaccatgcaggcatgtatcgatcgcgggatgaacaccgaaggtgtactgccaggcccgctgcgcgtgccacgtcgtgcgtctgccctgcgccggatgctggtttccagcgataaactgtctaacgatccgatgaatgtcattgactgggtaaacatgtttgcgctggcagttaacgaagaaaacgccgccggtggtcgtgtggtaactgcgccaaccaacggtgcctgcggtatcgttccggcagtgctggcttactatgaccactttattgaaagcgtcagcccggacatctatacccgttactttatggcagcgggcgcgattggtgcattgtataaaatgaacgcctctatttccggtgcggaagttggttgccagggcgaagtgggtgttgcctgtagtatggctgctgcgggtcttgcagaactgctgggcggtagcccggaacaggtttgcgtggcggcggaaattggcatggaacacaaccttggtttaacctgcgacccggttgcagggcaggttcaggtgccgtgcattgagcgtaatgccattgcctctgtgaaggcgattaacgccgcgcggatggctctgcgccgcaccagtgcaccgcgcgtcagcctggataaggtcatcgaaacgatgtacgaaaccggtaaggatatgaacgccaaataccgcgaaaccagtcgcggtggtctggcaatcaaagtccagtgtgactaatacttcttactcgcccatctgcaacggatgggcgaatttatacccgctttctcgtctgctgtaatattccccactacacttccactgttgcgtcaggcgtttgtcgccatacgcttacagggtggcccgcatgcaaaaagcacaacggatcattaaaacctatcgtcgtaatcgaatgattgtttgtacgatttgcgcactcgttacgctcgctagcaccctgagcgtgcgatttattagtcagcgtaacttaaatcaacaacgggtagtacaattcgccaatcacgctgtagaggaattagataaagtactgcttcccctacaggcaggtagcgaagtcttgcttccgctgattggtctgccctgctctgtcgcccatttgccattacgtaaacaggcggcaaaactccaaactgtgcgatccattggcctggtgcaagacggcacactttattgctccagcatttttggttatcgcaatgtgcccgtcgtggacattctggctgaacttcctgcaccgcaaccacttttacgcctgacgatcgaccgtgccctgattaaaggcagtccggttttgattcaatggacgcctgcagcgggcagtagcaatgctggggtcatggagatgattaacatcgacttactgacggcaatgctgcttgagccacaactgccgcaaatcagtagcgccagcctgacggtggacaaacggcatttgctctatggtaatgggctggtagattcccttccgcaacctgaagacaatgaaaactatcaggtttctagccaacgctttccttttaccattaacgttaatggtccgggggctacggcgctggcatggcactatcttccaacacaattaccgctggcggtgctgctaagtttactggtgggctacatcgcctggctggcgaccgcttaccgaatgagcttttcccgcgaaatcaatctgggcctggcgcaacatgagttcgaattgttctgtcagcctttgcttaatgcgcgcagccagcaatgtattggtgtagagattttgctgcgctggaacaatccgcgtcagggctggattagtccggatgtgtttattcctatcgcggaagaacatcatttaattgtgccactgacccgctatgtgatggcagaaaccattcgtcagcgccatgttttcccgatgagtagtcagtttcatgttggcattaacgtcgcacccagccattttcgccgtggtgtgctgataaaagatctcaatcagtactggtttagcgctcacccgattcagcaactgatcctcgaaatcaccgaacgcgatgccttactggatgttgattatcggattgcccgcgagctgcatcgtaaaaacgtcaaactggcgattgatgacttcggcaccggcaacagcagcttttcctggcttgaaacattacgtcctgacgtgctgaaaattgataagagttttaccgcagctataggttctgacgcggttaacagcacggtgaccgatatcatcatcgcgctggggcaaagactgaatattgaactggtggcggagggcgtggaaacgcaagaacaggcgaagtatttgcgccgtcatggcgtgcatattttgcaagggtatttgtacgcacagccgatgccgctacgtgattttcccaaatggctggcgggcagccaaccgccgcccgcccggcataatggacatatcacgcccattatgccgttacgttaacgcttactcatcttcatcgtgcgccggttgctctttaacaatgcgaaccagatcaacacgataatcattggcttcaatgatggtgatatgcagtggccctacatcaatcacatcgcccacacggggaatgtgaccatttgcgctgatcacgaggcccgcgaccgtcgcgatatcatcgtcatcggcaaggtgctcaacatcaagcgcctgctgcaaggcatgcaaatctgtaccgccttttaccagccagccgtcaccatcagtaatgatttccggcgtttcgtcagcgtccgggaattcacccgcaatggcttccagcacatccagcggcgtgaccagaccttgtaccacaccaaactcgttggtcacgataacaaagctcccgcgagcacgacgcagcacgcccaacaggttgatcggatcgagggtttccgggacgataatcgccggagacgcgctagcaatcgccgccacatcaacgccctcttccagcgccaccagcagttctttagcacgtacaataccgatgatttcatccagttcaccgcgacataccgggaacagactgtgcggactagagagcagttgctcgcggatttcatcgaccccgagattagcgtcaacccagcttatttcaccgcgcggcgtcatgatcccgcgcagagaacggctcgccagcgtcagtacgccgttaatcatgtaacgttcttcttcggcaaatgcaccttccgggatcggcatcggcatcgggttatcggcatcgtgctgaacattggcctgacgtttcccgcccatcaaacgcaggatggcatcggcagtacgcgctcgcagcggcaaagtgctctggtggcgaataaagttgcgacgcgcaatctggttaaacacttcgatgatgatgctgaagccaatcgcggcatacaggtaacctttcggaatgtggaaaccgaaaccttctgccaccagactcagaccaatcattaacaggaagctcagacagagcaccaccaccgtggggtgctggttaacgaatcgcgtcagcggtttggatgccagcaacataaccgccatcgcaatcactaccgccgccatcatcaccggcagatggttaaccatccctactgcagtaattaccgcatccaagctgaagacggcgtcaaggatgacaatctgtgtgacgaccacccagaaactggcgtagcctttaccgtggccggaatcatgatcgcggttttccagccgttcatgcagttcggttgttgctttgaacagcaagaatatccccccgaacaacataatcaggtcgcgtccggagaaggagaaatccatgacggtaaatagcggtttggtcagcgtgaccatccaactaatcaggctcagcagccccagacgcataatcagcgccagacttaaccccagcaaacgcgctttatcgcgttgttttggcggcagtttgtcagcaagaatggcgatgaagaccaggttatcgatacccagcacaatttcgagaacaacaagcgtgagtagccccgcccaaatactggggtccattaagaattccatgacaagctcctgcttaaggaatagctattcgacgccagaaataatgcaggcgtaacgacaaaatgcaaacgaaaggtgcggcatagagtgccagaaaggcaggcgttaaaaggcctgatgctgaaatgacgtcggtgacgatccatactgcgggctactgccctatactccatggttgttaaacgggagttaaacatatcagagacgcctctgatttggcaaagatttaccttcctttgcaaacgaatgtgacaaggatattttacctttcgaaatttctgctaatcgaaagttaaattacggatcttcatcacataaaataattttttcgatatctaaaataaatcgcgaaacgcaggggtttttggttgtagcccttatctgaatcgattcgattgtggacgacgattcaaaaatacatctggcacgttgaggtgttaacgataataaaggaggtagcaagtgaccattgctattgttataggcacacatggttgggctgcagagcagttgcttaaaacggcagaaatgctgttaggcgagcaggaaaacgtcggctggatcgatttcgttccaggtgaaaatgccgaaacgctgattgaaaagtacaacgctcagttggcaaaactcgacaccactaaaggcgtgctgtttctcgttgatacatggggaggcagcccgttcaatgctgccagccgcattgtcgtcgacaaagagcattatgaagtcattgcaggcgttaacattccaatgctcgtggaaacgttaatggcccgtgatgatgacccaagctttgatgaactggtggcactggcagtagaaacaggccgtgaaggcgtgaaagcactgaaagccaaaccggttgaaaaagccgcgccagcacccgctgccgcagcaccaaaagcggctccaactccggcaaaaccaatggggccaaacgactacatggttattggccttgcgcgtatcgacgaccgtctgattcacggtcaggtcgccacccgctggaccaaagaaaccaatgtctcccgtattattgttgttagtgatgaagtggctgcggataccgttcgtaagacactgctcacccaggttgcacctccgggcgtaacagcacacgtagttgatgttgccaaaatgattcgcgtctacaacaacccgaaatatgctggcgaacgcgtaatgctgttatttaccaacccaacagatgtagagcgtctcgttgaaggcggcgtgaaaatcacctctgttaacgtcggtggtatggcattccgtcagggtaaaacccaggtgaataacgcggttagcgttgatgaaaaagatatcgaggcgttcaagaaactgaatgcgcgcggtattgagctggaagtccgtaaggtttccaccgatccgaaactgaaaatgatggatctgatcagcaaaatcgataagtaacgtattgtgttgattatcactcagttttcacacttaagtcttacgtaaacaggagaagtacaatggagattaccactcttcaaattgtgctggtatttatcgtagcctgtatcgcaggtatgggaagtatcctcgatgaatttcagtttcaccgtccgctaatcgcgtgtaccctggtgggtatcgttcttggggatatgaaaaccggtattattatcggtggtacgctggaaatgatcgcgctgggctggatgaacatcggtgctgcagttgcgcctgacgccgctctggcttctatcatttctaccattctggttatcgcaggtcatcagagcattggtgcaggtatcgcactggcaatccctctggccgctgcgggccaggtactgaccatcatcgttcgtactattaccgttgctttccagcacgctgcggataaggctgctgataacggcaacctgacagcgatttcctggatccacgtttcttctctgttcctgcaagcaatgcgtgtggctattccggccgtcatcgttgcgctgtctgttggtaccagcgaagtacagaacatgctgaatgcgattccggaagtggtgaccaatggtctgaatatcgccggtggcatgatcgtggtggttggttatgcgatggttatcaacatgatgcgtgctggctacctgatgccgttcttctacctcggcttcgtaaccgcagcattcaccaactttaacctggttgctctgggtgtgattggtactgttatggcagtgctctacatccaacttagcccgaaatacaaccgcgtagccggtgcgcctgctcaggcagctggtaacaacgatctcgataacgaactggactaacaggtgagcgaaatggttgatacaactcaaactaccaccgagaaaaaactcactcaaagtgatattcgtggcgtcttcctgcgttctaacctcttccagggtagttggaacttcgaacgtatgcaggcactgggtttctgcttctctatggtaccggcaattcgtcgcctctaccctgagaacaacgaagctcgtaaacaagctattcgccgtcacctggagttctttaacacccagccgttcgtggctgcgccgattctcggcgtaaccctggcgctggaagaacagcgtgctaatggcgcagagatcgacgacggtgctatcaacggtatcaaagtcggtttgatggggccactggctggtgtaggcgacccgatcttctggggaaccgtacgtccggtatttgcagcactgggtgccggtatcgcgatgagcggcagcctgttaggtccgctgctgttcttcatcctgtttaacctggtgcgtctggcaacccgttactacggcgtagcgtatggttactccaaaggtatcgatatcgttaaagatatgggtggtggcttcctgcaaaaactgacggaaggggcgtctatcctcggcctgtttgtcatgggggcattggttaacaagtggacacatgtcaacatcccgctggttgtctctcgcattactgaccagacgggcaaagaacacgttactactgtccagactattctggaccagttaatgccaggcctggtaccactgctgctgacctttgcttgtatgtggctactgcgcaaaaaagttaacccgctgtggatcatcgttggcttcttcgtcatcggtatcgctggttacgcttgcggcctgctgggactgtaagactgttgtacactaccggggccttttggccccgtttttttatctggaggattaatgacaatcacggacctggtactgattcttttcatcgccgcactcctggccttcgcgatctacgatcagttcatcatgccccgccgtaacggccccaccctgctggcaattcctttgctccggcgtggtcgcatcgatagcgttatcttcgtcggattgattgtcattcttatctataacaacgtcacgaatcatggtgcgttaataacgacatggttattaagcgcactggctctgatgggtttttatatattctggatccgcgttccgaagatcatctttaaacaaaaaggttttttcttcgccaatgtctggattgaatatagccgaatcaaagcgatgaacttgagcgaagatggcgtgttggtgatgcaattagaacagcgtcggctgttaatccgcgttcgaaatatcgacgatctggaaaaaatttataagcttctcgttagtactcaataagttatgaatttagccaaagctatgtttagtgtatttttaataatcagacatagcttaggctatattacctcttcccttatttgttatttattttaacgtttcattgatatataaatccaaatgaaaatcgttatcaataaagcaatgaaataatatattccaacagttgttttatattctcaaaatatgttaaggttgcgccctcatttggggagtagccgatttccagattccggaaatgtacgtgtcaacatactcgttgcaaaacgtggcacgtacggactgaatactttcagtcaggcgagaccatatgcacatcaatcgctatgcctgcatgaacgcgaaaaccatcacggcttgttgttcatgtatgcatgtttgctgggggcgatgatgtgttttatggataccccggtcaggacattgtcatgaatatcactgctactgttcttcttgcgtttggtatgagcatggatgcatttgctgcaagtatcggtaaaggtgccaccctccataaaccgaaattttctgaagcattgcgaaccggccttatttttggtgccgtcgaaaccctgacgccgctgatcggctggggaatgggcatgttagccagccggtttgtccttgaatggaaccactggattgcgtttgtgctgctgatattcctcggcgggcgaatgattattgagggttttcgtggcgcagatgatgaagatgaagagccgcgccgtcgacacggtttctggctactggtaaccaccgcgattgccaccagcctggatgccatggctgtgggtgttggtcttgctttcctgcaggtcaacattatcgcgaccgcattggccattggttgtgcaaccttgattatgagtacattagggatgatggttggtcgctttatcggcagtattattgggaaaaaagcggaaattctcggcgggctggtgctgatcggcatcggcgtccagatcctctggacgcacttccacggttaataagaacgctgccagaggtgaatattaaagtccgtctggcagtcgaacacttcttttgctgccagtgtttgccagacttctggcttcgcacgccaggcaaacggcgtcatctgcaataatgcgacggcttcatcaccgcgaagacgcatcggataacacaactccgcactctgctgtaatgtaaaaccttccagttgttctgcatgaggtgcatgaagatgtacttcattgtaaatcagccccttcagctccatcaaatgtcgcggtcccggcgtggcagtaatgacccagccgccgggcttcactactcgtgctaattcttctgctttacacggcgcgtaaatacgtattatggcgtccatactggtatcggaaaacggcaaacggtggctggaagcgacacaaaaagtgacctgcggatagcgtttcgccgccgcttttatcgctaccttgctaacatccagaccaaacgtggtgatttcgggcaacgcatcggcaaatgcgtgtgtgtaatacccttcaccacagccaatatccagcaccgccgtggccttatcatcaagccgttccctcagttgggcgacaattgcatcacgcagcggctgataatgtccggcatctaagaatgcgcggcgtgcttgcatcatttccgcgctgtcgcccggatcacgagaccgtttatgctgaacgggcagcagattgacatacccttctttcgccatatcaaactgatgtcgctggggacagatatagctgtttttttcacggctaagaggctgatggcaaagtggacaggaaaaagacatgacaactccggcaggatactaaaggccgcaagtgtaacgcgaatcacgcggcgggcaaatatccgaacgccaggagcgaagataaagcatagtaaaaagcctcgcattcgacgaggctttatagcgagattgaagcgtattcacacttcagatcagtggattcgatcagatagctgttacgttaacagctgccggacctttctggccgtcctgaatttcgaactcaacgttctgaccttcagccagagttttgaagccattaccctggatagcggagaagtgtacgaacacatctttgctgccatcagccggagtaatgaagccaaaacctttagactcgttgaaccacttaacctgacctttaatctttgccatttgaaaaattccttagattgttttcttcgcccgcaggcataacatagataaaacactcacattactgcaactggcaccaatataaggctcggcagagaagcggtattcaacgtcaacgtgtttactcaggacttctttactgaaaatgccacacataaacagaactgtacctcgtttaacccgaaatctgttatcacatacaacgttaattatggcaagccatttttaaacatgtctcgatcagacgcacaaatctcgatacgtcttccactttttttgcacacttatgcaacggaatacgcgccgatatatcattgtgcttaaccttgccagttcaggcagatacttaaactggcgtattttctaacatagttcaataagttcagttgttccaggccagtgggagaagttattacatagtgcgtgcaatatcacattttttgctatgcaatgaataaaaagttatatcactttttctcataaaacagtcagttaacggctattaattaccctaaagagaagtcaatccccaaagggattgtaaatttaaaataagaaaaattgatgaatgagcaaaaaaatcaagagagaaacgtttcgctaataaataataccacgcttaatcacaaatccgatgtaaacatcctaataaattaatggggtaaatatctttttctgatatcccgttacgcaaataaataatatgataattatttgaagtcagaccagagttttaatttgaagcagttgcaccatgacagtgcgtataatcaggatgaattgagtaacccttcaacgacggggttactcaagattgaggaaggattatcgttcggcgaccagacgaataatatcttcgtcttcaacgcttttttgactctcaacggtctttttatctgctttctctggttcgtttgcttcgcacaaacgacgtaacagtgcattttgacgtttttgctgatccagcaacgcctcaagcagttcaatctgttcgttagtccgactactggcacgattgataaaaaaccacaagatgagcccgataagaagaaccaccacgcttacaaccaaagacgcaatgttcatcacgccactatttacaacttcgttcatttcaccacctctgagtagaggcgctattctaccactgctggagaggaagaaaatctagtgctgaaaaaatgatatcaccacgggataaactggttaatggcacaaattccgctgaaaaattgtacatcctgatcgcacatcatgttgaatacctgcgcccaaagcagcaagcaagccaacaccacgacaaccagaacgacccatcgaaactttttcactccaatctccgtttcacctaccttatgtcattaaactagcatgcgttagttaaacagcgcctaactatgtcgatattcgtgctttttcggaatgagtcgcttgcttcagcgcatattgccgctacgattaagcgaacataaaaagagaagaggttgtaatgcgattcatcattcgcacagttatgctgatagcactggtatggataggattattactcagcggatatggcgttttgattggaagcaaagagaatgccgcaggattaggtttgcaatgtacctatctgactgccagaggcaccagcacggtacaatacttgcacactaaaagtggttttttggggataacagattgcccgctgttacgcaaaagcaatatcgtggtcgataatggttaagggcaataaataaccagattctcactcctgagtaaaatactcttatagcaagcgcgtttaatataacgccaccttcaactttatttttctcatgctaaataaagaacctgtctgtttgatattccgacaggttcttactctcatcagaacggatagtcgtgataacccatttgggcagaaattttgcgcgctgcggtatgcaacattgcgacatattcctgtaaacgctcttcagagaaacgcaacgtcgggaaggagatgctcaaaccggcaatgaccacgccaaagcgatcaaataccggtaccgcaatgcatcgcagcccttcttcctgctcttcattatcttcgccatacccctgctcgcgcacctggtccagaacgggtaataacgcttctgtactggtgatggtccgctcggtactgcgtttatactccacgccctcaagaatttgcttcacttcatcgcgatcgcgccatgccagcagtaccttaccaatcgcggtgctgtacagcggattacgacgcccaatccgactatacatgcgcaaattgtacatagagtcaattttgtgaatgtaaacaatactgtcttcgtccagtgcgccgaggtggatagtttctttggtcaggcgggagagctcacgcatctggatatctgcgctacgaattaaatcgacgttttgtaacgcgcgagcgcccagttcaaacaatttcagggtcagggaatatttctcgctctccccttcctgcgccacataacctaaggttttcatggtctgtaaaaagcgataaacggtgcttttactcatcatgacgcgctggctcagctcggttatccctatttcgcgctcttcacccagcgcctgcaaaatgccaaaaacttttagcacggaagatacagaatcaggctgtttatccagatctgcgttagccatttatcacctcattgcgagtgttttataaaaatcagaactgttttttattataatttcgcaccagggtggtcgcaatccatcttttgccggttagttacaattctgcgacatccaccgtgaatatcagtgctagaatcatacccctgttgattattcaccaaagatataaaattcctatgccaaaagttcaggccgacggcctgccattgccccagcgatacggtgcgatattaaccattgtgattggtattagcatggccgtccttgacggcgcaatcgccaacgtcgccctgccaacaatcgccacggaccttcatgccacgccagccagttccatctgggtagtgaacgcctatcaaatcgccattgtcatctccctgctcagctttagctttctgggcgatatgtttggctatcgacgtatttataaatgcggtctggtcgtttttctgttgtctagtctgttctgcgccctttctgatagcctgcaaatgctcacccttgcgcgtgtcatacaaggtttcggcggtgcagcgttgatgagcgttaataccgcacttatccgcctgatctatccacaacgttttctgggtagagggatgggcataaacagctttattgttgccgtctcttctgctgccgggccgacaattgctgcagcaatcctctccatcgcatcctggaaatggttatttttaatcaacgtaccgttaggtattatcgccctgcttctggcgatgcgttttctgccacccaatggttctcgcgccagtaaaccccgtttcgacctgcccagcgccgtgatgaacgcgttaaccttcggcctgcttatcactgcgttgagtggtttcgctcaggggcaaagcctgacgttaattgctgcggaactggtggtaatggttgttgttggtattttctttattcgccgccagctttctcttcccgtaccgctgctaccggtggatttactgcgtatcccgctgtttagtctttctatttgcacatctgtttgctctttctgcgcacaaatgctggcaatggtttccctgcccttttacctgcaaaccgtgctcgggcgtagtgaagtcgaaacaggtttacttctgacaccgtggccgttagcaacgatggtgatggctccgctggcaggctatttgattgaacgcgtacatgcaggattgctgggggctttagggttgttcatcatggctgcggggcttttttccctggttctgctgcccgcgagtcctgcggatatcaatattatctggccgatgatcttatgtggtgctggatttggcttattccagagtcccaataaccacaccattattacctccgcgcctcgcgaacgtagcggtggagccagtggcatgttaggaacggctcgtctactgggtcagagtagcggcgcggcgctggtggcgctgatgctaaatcagtttggagataatggtacacacgtcagcctgatggctgcggctattctggcagtgattgctgcctgtgtcagtggtttacgtatcactcagccacgatccagggcataaaaaaagcgcgtcgatcaggacgcgctttttagtatttacttcatattacttcaggtattcacccgtacgcagagcttcaattcgtttatccagcggcgggtgggtcatgaacaactcactgaggcttttgctcttaccgttaatgcagagagccatcatgctggttgcttcttgcggttcatagctggttttcaggcgctgcagcgcggcaatcattttctcgcgaccaaccagttttgcgctaccggcatcagcatggaattcacgatgacggctgaaccacatggtgataatgctcgccagaataccaaacaccagttccagaaccgttgcaaccgcaaagtagatcagcgggttgccgttgctctcttcaccttcatcacgatttccgcccataaaacccgcggcaagctgcgccagaatacgggaaataaagataacgaaggtgttcaccacgccctgaatcagcgtcatggtgaccatatcaccattggcgatgtggctgatttcgtgagcaattaccgcctcggcttcatccgggctcatgttctgcagcaaaccggtgctgacagcaaccagagaggcatcacggcgcgcaccggttgcaaaagcgttgatgtccggcgcatggtagatagccacttgcggcatagcgatccccgcctgacgagcctgggttgctacagtattgaccagccaacgttccctttcgttacgcggttgctcgatcacttccccgccaacagatcgtaatgccatccatttggacatcagaaggctaacgaaggaaccaccaaaaccgaacagcaaggccatgatcatcagcccctgaacgctgctgctctgtatccctgtcaggctcagtaccagcccgaaaacgaccattacggccaggttcgttagcaggaagagcgcgattcgcatcataattttctttttacctcagtttaacaaaacgcaatatgcgatacccacatcgtatgggttacgcgactattttcaagtctggatagtgcgtaagtcaccagaaagacacaactttacattttgtagcatctgatttacggcatcttgtcgctgttaaaaaatcaggcacaatttcttgtgcctgattgatattacttgacgggagcgggttgttccgcgggtctggctttttcaagcttcgccagatcgagtgcgatattcaccgtctcatccagataaggatccggctcctggtaatctttcggtagatcatccagtttcttcaactccggtttaccttcgcgtttaaagcgttcgttcaaacgcgccagacgcgtcgcatcatcttcattattctctttctcacgcacagcgtaattcagagaaacgatattgcgcttgtccttcatagcgttgaagcgcgcgatatccttcatgatgttctggaactcaggatctttcgcgatacgcgcattatgttccttcagcagctccggttcaaaggccgttaaatctccacttttcacataagtcgcggcatcaatgctatcccacggcagcgcgttatcttcgaatttctcacccgtttccgtttcttcattacccgtcggcatgatgatgtctggcgttacgcctttacgttgcgtactgccgccgttaacgcgatagaatttctggatcgtgtactgcacagaacccagcgctggccattcaggacgtaacatctgatcgtaaatacggttcaaactacggtattgctgaacggtgcctttaccaaacgtcggttcacccacaaccagcgcacgaccgtaatcctgcattgccgcggcaaagatttcactagcgctagcactgaagcggtcaaccagcaccaccagcgggcctttatagaaaacctgtccgtcggtatcgctatcttcacgaaccttgccgttgttatcgcggacctgaacaatgggacccgcaggaataaacagaccggagaggcttacggcttcagttaacgccccaccgccattgctacgcaggtcgatgatgacgctgctgacattctgtttttccagtttctgcagttgcactttgacatcgtctgtcaaacccacatagaagcccggaatatccagcacgccgactttctctttaccgacggtcttcacgctcattttaaccgcgcggtcttcgagacgaatacgttcacgggtcaacgttacagtacgggtcttggtccctttaccagcaggtaaaatttccagacgaactttactgcccttcggccctttaattaaggcaaccacatcatcaagacgccagccaatcacgtcaaccatcggcttgcctgtttgaccaacaccgacaattttgtcaccaacgctgatagctttactcttcgctgccggaccacctgccaccatgctattgataacggtgtagtcatcatccatttgcagcactgcgccaataccttccaggctcaaactcatttcagtgttgaactgttcggtattacgcggggaaagatagttggtatgcgggtcgatttcacgcgcaaacgccgtcattgccaggctgaaaacatcttcgctgttggtttgcgccagacgacgaatggcaaatttgtagcggcgagtcagggtttcacgaatttctttatccgtttttcctgtcagcttcaggcttaactcgtcgaatttgactttactgtcccacagcgcgttcaactcagcctcgtttttcggccagggcgctttgctgcggtcaaggttataagtgtcgttgccggtgaaatccatcggcttttccagtacgctcaaagcgtactggtaacgctcaaaacggcgcttttgcgccagattgtagagatcgtagaaaacgtcgagtttgccactacgcagttcatcgcctaactcggttttctttttcgcgaactgttcaacatcgcttgccagcagcacgttgtggctgtaatcgagcagattcaggtagcggtcaaagattttggcgctaaatgcctgatcgaggtcgaactggcgataatgagaacgggtgaagcggctcgttacgcgctcacttaccgtcgcatgctgcgtctcttcctttaataccggaatttgatcagcacgcgtgatatcttctacagcgaaggtctggcctgctattgcaagcaggccagctaacgcggtaagcctaaaaaacatgttcatgcctggcccggcctccgtttcagaacaccaggtgttctgcgcgcacaatcaaagacataccgctattcagctggacgcggacgccgtctttggtgatttctaatacggtggcatccatcgcgttttgacccgctttcaccttcagggcttgtccgacagtcagagcactaatgtcagaaaccggggtgtgctgttcttcgcgaggtgcttttactgtttttggcgctttctctaccggcttttgcgcacgaggtttacgttcagcgccttctttgcggcgtggcgtagtcggacgtggcttgcgttcgcggcgcggtgcgtcttctttctcaccagcagttgcggcagcttcgcgttttttcgcttgctgttcagcacgctgtgcctgaacacgcgctttcgcttcttcaagctgcttgcgagcatgctctacatgttgctcgtccagctcaccgcatgggttgccgtcaagatcgacacgcgttgcgccgggtttaacaccgtaaagataacgccagctgctagtgtagagacgtaaagcggatcgcaattgcgttttgctcaggttcatttccccagcaacacgatcgaccaaatcctgaaaaataccgattttcagcggacgcgcttcaccttccgcactgaaacagtggggaaaacgttcggccagaaacgcgattacttctttactgctattcaacttaggttgattttccatgaaatttcctgattacaacggacgtagccaacaagcgcaggcatgaacaggcgtcattataatgacgctatcagtaaatgctacgttatccgttgattatcctgcgacgctcgcaaagaattttttgtaatccgtcgttgcaagcactttttcaagctgtgccacaagctgacgtaagccttgctcgtcctcgtctgtaaagcgaccgaagacggtactatcgatgtcgagaacaccaataatctgatttttcaccaccagcggcagaacaatttcagaattactcgccgcatcacaggcaatatgcccgtcaaacacatgaacatcctcgatacgctgcacttgattgcgggcaaccgcagtgccgcacacgccgcgcccgacgggtatccggacacaggcaattttgccctgaaatggtccgagtaccagtgtatcgtcctcaagcaaataaaaacctgcccagtttatgtcagtgagacgctcatataacaacgcactggtgttcgcaagcgttgccagaaaactggtttctcccgccatcagcgcgttaaagtcgcgatttaaatccgcgtaaaattctgttttgttcattatataatcacttggttgtcttacctggatctgccagcctattaaaataagcattaaatgcgttaatgctcaagatcattcccatcatgggttaagattaatgttaattcttattacatttggcacgtcatggctcttaacacaccacaaattacgccgacaaaaaagataacagtgagggcaatcggcgaggaactgccgcgtggtgattaccaacgttgcccgcaatgtgacatgctgtttagcctgcccgagataaattctcatcaaagtgcctattgtccgcgctgtcaggcaaaaattcgtgacgggcgcgactggagcctaacgcgcctggcggcaatggccttcaccatgctgttgcttatgccgtttgcctggggcgaaccgctgttgcatatctggctgttaggcattcgtattgacgccaacgttatgcaaggcatctggcaaatgaccaaacagggcgatgcgataacggggagcatggtctttttctgcgttattggtgccccgctcattctggtgacctccatagcttatttatggtttggtaaccgactgggaatgaatttacgtccggtactgctgatgcttgagcgacttaaagagtgggtaatgctcgatatctacctggtcggcattggcgttgcttctataaaggtacaggattatgcccatatccaggctggtgtcggcttgttctcttttgtggcgttggtgattttaacgacggtgacgttgagtcatcttaatgtcgaagaactgtgggagcgattttatccgcagcgccccgctacgcgtagggacgagaaacttcgtgtctgtcttgggtgccattttaccggctatccagatcagcgtggtcgctgcccgcgttgccatatcccgctacgcctgcgtcgccgtcatagtctgcaaaaatgctgggcggcgctgttagcgagtatcgttttattgttacctgccaacctgttgcctatttctatcatttatctgaacggaggacggcaggaagatacaattctttccggaattatgagcctggcaagtagcaacattgcggttgcaggaatcgtgtttatcgccagtattctggtaccgtttactaaagtgatcgtcatgttcactttactgttgagcattcattttaaatgccagcaaggtttacgcacacgcattctgttactgcggatggtgacctggattggtcgctggagcatgctcgacctgtttgtcatatctttaaccatgagcctgattaatcgcgatcagatcctcgcttttactatgggaccggctgcgttttatttcggcgcagcggtaattttgactattcttgctgtggaatggctggacagccgcttactttgggatgcacatgagagtggaaacgcccgcttcgacgactgaataaccgcttactttgggatgcacatgagtcaggaaacgcccgctagcacgactgaagcgcagattaaaaataaacgccgtatcagtcctttctggctgctgccgttcatcgcgctaatgattgccagttggctgatttgggacagttatcaggaccggggtaataccgtcaccatcgactttatgagcgcggatggtattgttccaggccgtacgcctgttcgttatcagggcgttgaagtcggaacagtgcaggatatcagcctcagcgacgatcttcgtaagattgaagtcaaggtcagcatcaagtccgatatgaaagatgcgctgcgcgaagagactcagttctggctggtgacgccaaaagcaagcttggcaggtgtctccgggctggacgccctcgtcggtgggaactatatcggcatgatgccgggtaaaggtaaagagcaggatcactttgtcgcactcgatacccaaccgaaatatcggctggacaatggcgatctgatgatccacctgcaagcccccgatctcggtagcctgaacagcggtagtttggtctatttccgcaagatcccggtgggaaaagtctacgactatgccatcaatcccaacaagcaaggcgtggtgattgatgtcctgatcgagcggcgttttaccgatctggtgaaaaaaggtagccgtttctggaacgtttccggcgttgatgccaacgtcagtatcagtggcgcgaaggtgaaactggaaagcctggcggcactggttaacggtgcgattgccttcgatagtccagaagagagcaaacctgccgaggcggaagatacctttggtctgtatgaagatctggcccacagccagcgtggcgtaataataaaactggaactgccgagtggggccggattaaccgccgacagcacgccgttaatgtatcaggggctggaagtcggacagctgactaaactggatttaaatcctggtggtaaagtcacaggggaaatgaccgttgatcccagcgtcgttaccctgcttcgtgaaaatacccgcatcgaattacgcaacccgaaattatcccttagcgatgctaatctcagcgccctgctgaccggcaaaaccttcgagctggtgcccggcgatggcgagccacgcaaagagttcgttgttgtgccaggcgaaaaagcactgctgcatgaacctgatgttctgacgctgaccctgaccgcgccggaaagttacggtattgatgcgggtcagccgctcattcttcacggcgtgcaggtaggccaggttatcgatcgtaaactcaccagcaaaggcgtcacctttaccgtcgccatcgagcctcagcatcgcgaactggtaaaaggcgatagcaaatttgtcgtcaacagccgtgtcgatgtgaaggtggggctggatggcgttgagtttctcggtgccagcgccagtgaatggatcaatggcgggatacgtattctgccgggcgataaaggtgagatgaaagccagctatccactgtatgccaatttggaaaaagcgctggagaacagccttagcgatttacccaccacaaccgtgagtttgagtgcagagacgctgccggatgtgcaggcaggaagcgtagtgctgtaccgtaaatttgaagttggtgaagtgattaccgtgcgtccgcgagctaacgcgtttgatatcgatctgcatattaagccggagtatcgcaaccttctgaccagcaatagcgtgttctgggcagaaggcggggcgaaagttcagctgaatggtagtggtctgaccgtacaggcatccccgctctccagagcattaaagggagccattagcttcgacaacctcagcggtgccagcgccagtcagcgtaaaggcgataagcgtattctgtatgcttccgaaacagcggcccgtgcggttggcgggcagattacgcttcacgctttcgatgccggaaaactggcggtcgggatgccaattcgctatctcggtattgatatcgggcaaatccagacgctggatctgattaccgcacgcaatgaagtacaggcaaaggcggtactttacccggaatatgtccagacctttgctcgcggtggtacgcgcttcagtgtggtcacaccgcaaattagcgcagctggcgttgagcatcttgatactatcctccagccgtatatcaacgtcgaaccaggccggggcaatcctcgccgcgactttgaattacaagaggccaccattactgatagccgttacctggatggcttaagcattattgttgaagcgccggaagccggtagcttaggcatcggtacgcctgtgctgttccgtggtctggaagtcggtacggttacaggaatgacgctggggacattgagtgatcgcgtgatgattgcgatgcgcatcagtaaacgctatcaacacctggtgcgtaacaattccgtcttctggttggcaagcggttacagtctggactttggtctgacgggcggcgtagtgaaaaccggcacctttaaccagtttatccgtggcggcatcgccttcgccacgcctccgggtacgccactggcaccgaaagcccaggaaggcaaacacttcctgttgcaggaaagtgaaccgaaagagtggcgtgaatggggaactgcgcttcccaaataatgcccactgctccggcgtgcctgcgccggagcgtttatgctaaactgcgcgcctgtttttttgccagtggtacatgctcgtggcccaacacaccgtttatttcccggacgcctttctgacacaaatgcgcgaagcgatgcctagcacgctcagttttgatgattttcttgccgcctgtcagcgcccgttgcgccgcagcattcgcgttaatacgctgaaaatctccgttgctgatttcctgcaattaaccgctccttatggctggacgcttacgccaattccgtggtgtgaagaaggtttctggattgaacgcgacaatgaagatgcattgccattgggtagtaccgccgagcatttaagtggcctgttttatattcaggaagccagtagtatgttgcctgttgccgccttgtttgctgacggtaatgcaccacagcgggtgatggatgtcgctgccgcgcctggctccaaaacgacgcaaatttccgcgcggatgaataacgaaggggcaatccttgccaatgagttttccgccagtcgggtaaaagtgttacatgccaatatcagccgctgtggtatcagtaatgttgcgctcacacattttgatggccgcgtgtttggtgcggcagtgccagaaatgttcgatgccattttgctggacgctccctgctctggcgaaggcgtggtgcgtaaagatcccgatgcgctaaaaaactggagtccagaaagcaatcaggaaatcgcagctacacaacgggagcttatcgacagcgcctttcatgcattacgtcctggtggtacgctggtttacagcacctgtaccttaaaccaggaagaaaacgaagccgtttgcctgtggctgaaagagacttaccccgacgcagtagagtttttaccacttggcgatctcttccctggtgcaaacaaagcgctgaccgaagaaggctttttgcatgttttcccacaaatttacgactgcgaaggcttcttcgttgctcgtctgcgtaaaactcaggcgattcccgccttacccgcccccaaatacaaagtcggtaattttccgttcagcccggtgaaagatcgcgaagctggacaaattcgtcaggcggctacaggtgttggcttaaactgggatgaaaacctgcgcctctggcagcgtgacaaagaactgtggttgttcccggtgggcattgaagccctgatcggtaaagtccgattttctcggttggggattaaacttgccgagacgcacaacaaaggttatcgctggcagcatgaagcggttattgctcttgccagtcccgataatatgaatgcattcgagctgacaccgcaggaagcggaggagtggtatcgcgggcgcgatgtttacccgcaagccgcgccagtggcggatgatgtattggttactttccagcatcaaccgattggtttagccaaacggattggtagccgattgaaaaacagctatccgcgtgaactggtgcgcgatgggaaactttttaccggtaacgcctgacagcgcacaaaaaaagcgcactttttgactggcacattcggctgcctcaactaggctgaaaaatggtgcgatcggactggtcgtaccacaatcggcagctaaatggagagcacgaagatgaaaaccagtgtgcgcataggcgcttttgaaatcgacgacggcgaattacacggtgaaagcccaggtgatcgaacgttaaccattccttgtaaatctgaccccgatttatgtatgcaactggatgcctgggatgctgaaaccagtatccctgccctgctaaatggcgaacactctgtcctttaccgtacccgttacgatcaacaatctgatgcctggattatgcgtcttgcctgatccaaaaagaacccgtcggcatggcgggttatttgtcctggttattcccccgttgtaaaatctctcctaaacttaacggtacggcaccacacttcggggatgaaatgttcgcgctggtactttttgtttgctacctggatggcggttgtgaagatattgttgtggatgtctacaacacggaacagcagtgtctttattctatgagcgatcaacggatccgccagggcggttgttttccgattgaggattttatagatggtttctggcgacctgcacaggagtacggtgatttttaattattgcaattgcacaagagtcagttcgcccccaaagacagcaccggtatcaatataatgcaggttgccaatatccacgcgatgtcgcaacggtgtatgaccaaaccagaaatgatcagcacctgtaattccctgccctttttggcgttcacctaatcggctgcggctccacaagacctgatgcaaatcaacgtccttttgccattcataaacatcatctggataatcggcatgagcaataatatgcttgccggtgcgactgtgtacttcaagaataaagggcaaatgctgacatttttccagcgccgttttcgcttgtttctgttgattatctgccagcgcaataaaccagtcgccgccattcatcaaccacaaagacatctgctgggatgccagcgcatccatcgccatctgttcatgattgcctcttaccgcacaaacccaatgttgttccagtaactgcagacaacgtaaactttgcggcccacgatcgataacgtctcccacactgataagtaaatctcgccacggatcaaaacgacaatgccataatttgcggcgcaactgctcaagacaaccgtgtatatcgccagaaagccagatatgtcgccattgatgacccgcaattctctgataaacgggcgcaggctgtttcatcaatattttcctcccgcgctaaagatcacataatcttaacaagaatgttaaaaaacgctggactcagacagtagagtgtgtgttatggttgactataaagtcagcgaaggaaatgcttctggcttttaacagataaaaagagaccgaacacgattcctgtattcggtccagggaaatggctcttgggagagagccgtgcgctaaaagttggcattaatgcaggcttagttgccttgccctttaagaatagatgacgacgccaggttttccagtttgcgtgcaaaatggtcaataaaaagcgtggtggtcatcagctgaaatgttaaaaaccgcccgttctggtgaaagaactgaggcggtttttttattggaaatcaaaaggctattttaggtaattaacagagtttttcagctcgttctataaacggtgccagactcattttttcgccgggattgttaggatcatcaatctgaatcacgctaatgggttgggcattggtcttcccactggcaacttccttttgtgcgatatcgtttaaaggatactgcacgagggtactcggattaataacatacaaagcattacccggtcggcaagtcagcatcacctcttcgcgattaaacgcccatttgtctttacccacttcaaaacgactgacggtaatcacctgcggtgcagccagcgccgctgcagaactggtgagtaacagaaacgccagaatactttttttcatcattttcgtaatccatcaaaaaggttcgagagtcgcaagcaggctgatgatcaccagcactaccgcacctatcgcccattcgagtttagtcatccacacaaaccagggtgccgcacgatcttcatcctgcctcatgcgcggtacaagaacataacgattagccagcgcaatgaccaccataatcatcaccaggatggctttgagcaataagagttggccccagtaagtcgtaagcgtggggggaaatccggtaatcaacaatgcattaagcacgccgcttgccagtacgccgatcaccgcaaaatgcccgcaccaggaaaaacgcatcagcgcctgaatagcctggtgtcgccaacggcctttgatgagttgcatacaccagagcaccggcagtaatcccccaaaccacgccgccgcacaaatcaggtgaatcgcgtgattagtctgatggattttcgctgttaccccttcattcagcgtcgcatgccccactcccgccagcagaataaattgcgcggtagtgagcataaacagcaaacgtggcatattccgcggttgcataagggcgacgatcaacgttacgagggcgagaacaatttgccataaccagatgccaccaaactgcgtttgcaaaacagcctgccaaatgtttgggctaaatacatctgtccatcccgttcccatcaacccgccctgaacggcgagcattgcagtggcactgatcaaactccagacggcagcgtgctgttgtaaacgcagaaaacgcttcgccagcaagcgacgaatcgtcaagggggccagccaggcaccgtacattgcgaagccaaaaaccagcatcaggctggtgaaatggataaatcgcagcgcgatccaggtaaacgccagcatgatttatttcacgctaaaggtgtagtgtcctttcgttttatgcccgtccacgctaacaacatgccagtcaacggtgtaggttccgggtttcaggctatcggccagtggaacaatcagttgcttttggtcctgctcatttcgcttcgccggtaatgttttaatattttcgttttttggccccgtgatttttgcaccactgaatcctgtttcaacaccttcgctgaagtttaaagtgattgcctgcggtgcagctgtcacttgcgcgtttgccgcaggatactgatgcgttaaatgcgcatgtgcccagacggaaggtgtcaccaagctagtggtcaggattgccagcgcgtagcgaagggagcgtgcagtactagccatattatctattcctttttgtaataacttttttacagagcataaccttgtctaatgtctgagtcgaggatcatcaattccggcttgccatcctggctcactcttagtaacttttgcccgcgaatgatgaggagattaagaatgctgaagaatctggctaaactggatcaaacagaaatggataaagtgaatgtcgatttggcggcggccggggtggcatttaaagaacgctacaatatgccggtgatcgctgaagcggttgaacgtgaacagcctgaacatttgcgcagctggtttcgcgagcggcttattgcccaccgtttggctagcgtcaatctgagtcgtttaccttacgagcccaaacttaaataaaacttatacagagttacactttcttacataacgcctgctaaattatgagtattttctaaaccgcactcataatttgcagtcattttgaaaaggaagtcattatgagcttctggaaagttgcagcagcgcaatatgagcctcgtaaaaccagtctcaccgaacaggtagctcatcatctggagtttgtgagggccgccgccaggcaacaatgtcagctgttagtttttccaagcctttctttactggggtgtgattatagccgacgtgcccttcctgccccacccgatctcagtctgttagacccgctttgttatgccgcaacgacctggcgaatgaccatcattgccggccttcccgttgaatataacgatcgctttattcgtggaattgcggtgttcgcaccgtggcgaaaaacgcctgggatctaccatcagagtcatggtgcatgtctgggccgtcgttccagaaccatcacggtggtcgatgaacaaccgcaaggtatggatatggacccgacctgtagtctgtttactacagggcaatgtctgggagaacccgacctgctggcgagcgcccgtcgcttacaattttttagtcatcagtacagcattgccgtgctgatggcaaatgcccgtggtaacagtgcactatgggatgaatatggtcgtctcatcgttcgcgccgatcgtggtagtttattgttagtcggtcagcgtagtagtcagggttggcaaggcgatatcattccattacgctaagctttttcggcctggagcatgccatgttgcgcattatcgatacagaaacctgcggtttgcagggagggatcgttgagattgcctctgttgatgtcattgacggaaaaatcgtcaaccccatgagccacctggtgcgccccgatcgtcctattagtccacaagcgatggcgattcatcgcatcaccgaagccatggtcgccgataaaccgtggattgaagatgtgatcccacactattacggtagtgaatggtatgtcgcgcataacgccagctttgaccgccgcgtactgcctgagatgcccggtgagtggatttgcactatgaaactggcccgtcgtttgtggcctgggatcaagtacagcaatatggcgttatataaaacacgcaagctcaatgtacagacgccgccgggcctgcatcatcaccgcgcgttgtatgactgttatatcaccgccgcgttgcttatcgatattatgaacacctccggctggacggcagaacagatggccgatatcaccggacgtccgagcttgatgacgaccttcacctttggcaaataccgtggcaaagcggtttccgacgttgccgaacgcgatccgggctatctgcgctggttatttaataacctggacagcatgagcccggagctgcgtttaacactgaaacattatctggaaaatacttaatccgcaggcgtagcgggtaatgttccctgcgccagcgcgaccagaaaagcatattccatcgctacgccttcgtagcttttaaagcgaccagatttaccgccatggccactgtccatgtcggtacagagcaataaaagatggtcatcggttttcagctcgcgcaatttagcgacccattttgccggttcccaatattgcacctgagaatcgtgcaaaccggtcgttaccagtaaatgcggataagcctgtgcggtgacgttgtcatacgggctgtagcttttcatgtactcgtaatattgcggatcctgcgggttaccccactcttcaaactcaccagtggtaagaggaatactttcatcaagcatcgttgttacaacatcaacaaacggtacctgggcgataacgccgtggaataattccgggcgttgattaattgcaacgcccatcaacatgccccccgcactcccgcccatcgcataacaaaggctaggagagccatagcccagttttaacaatgcatcgcaggcatcaagataatcattaaacgtatttttcttcttcagaaattttccgtcttcgtaccattgttgccccagctcaccaccgccgcgaacatggacaatggcgtagacaaagccacgatctaacaaactcaagcggctaaaactgaaatcggcatcaatacttgcgccgtaagaaccatagccatacaccagcaacgggttgtgtcctttgcgaaaatgtttgcgatggtagaccaagctaaccggaacttcgacgccatcacgggcgactatccacaggtgttcactgcggtaattcgccgcataaaaaccaggaacttccgtttgttttaatacacgacgctcaccggtatccatatccagttcaaacaaagtgtctggtgtagtcatggaagaataaccataacgcaatcgcgcggtttcaggttctggattgtaggcaatccaggtcacataggccggatcatcaaaggcaataccaatgacttcccgggtcttgcggttaatttggcgcaaactggttaacccgcgctgacgctcttcaaccaccagccagtcggtaaacagcgtaaacccttccagcatgatgttttcgcgtggcggaattaactcttcccactgttgctcatcacgcatacgggtacggtataagccaaagtttttgccgtggcggttggaacgcagataaaaacgatgctggtagtgatcaaggctgtattcgtgatctttgcggcgcggcagaaaaacaaacggctcggcatcggccatttccgcgtccagcaggcgaacttcactggtggtggcgctggccaaatgaatgactacatagtgcttgctggtcgttttatgcaggctgacgtaataggtatcgtctttttcttcgtagatcagtttatcttggcttgctggcgtaccgatggcgtgacgccagacctgataaggcagcagcgtcaccggatgcttgcgaacatagtagaaaatccaggagtcatttgcccagacaaagctgggttcaacgttatccagcagttccgggtaccagttaccagtttccagattacgaaaacgaatgccgtactggcgtcgggaaagaaaatcttctgccagcgccataatggtgttatcgggcgtaatcgccattccgcccatgctataaaactcactatgagctgcgcgcttattggcatcgagcaatgtttcccactcatcccactcttcactgaatgcgctttgacgctggtagatagcatattcacagcctggttcataaatatgccgatagcggtagccatttttgatgtagggcgcagaaacttctcgttgcggaatgcggtcgatgatttcctttaagatgcgatcctgcaaggcttgttgactggccatcacccgatgaccgtaactattttcttgttgcaggtagtccaggacttctggctgagaacgcgtatcgtcccgcagccagtagtaattatcgatgcgcgtatcgccatgaagcgtcatggcgtggggaatgcgggcggcttttggtagcatgttattgttctttctggttgaaacatcttataagggtggcaaaactcaccggggatgcaagcgaaacaggggagtcattgcttagatgatgacaggtaatggcgcggatatcgaatgttatgcagacagagaaaatcagcctgttcaaatggctgtgcgattctggatagcccgaaatagtcaacttcaggctatccagagagcggaattattccgccaaagtgcgtttttgctgttcgagatcgcgttcaatgccgtcacgaacatcctgggggattttcagcgcgtcacccagtgcattcaggtaactgcgttccataaaatggtcaatatcaatagccgcgcaactcaggaaatagatttccagcgcctcttcttcattgcggaccccggtagccaggcgttgtggatccagcggttgttcgattgcctgctcaatgagtacacgcccctgctcttccacgccggctccacgcaattgctggtcgattgccgcacgttctttggcatcaatatgaccatcacttttagcggcaaagaccagcgcaaggatcaaacgtgctgtacgctcatccagcggcgtactttgcgcgccaaactgcggttcgtcctgatgcgccgcgcgaattttatctttgtatttattccacagcaccgtacccgctaccgctccgccgccaaccagtaacgcgttggtgccatatttcgtaagaagtttacgtgcacttttatttgcgaccagcagcccagccagtccgcctaatgcgcctggcactaacagtttgaccaatccctgatccgcagagctggaggtagaagaactgctttgcccaagcagggattgcagttgatttaaccagttagccatatttgctcctcaataaccatttttagtgcctgtagcatagcggatgaggatgtcagaaaatgtatatcgagacaaaagatgcgcaaataagcggggcggtaggccgttattcaaagaaattcgcgccaggtaaggtatttactgtatatcaggtgataagggtattttaggtgaaagtagtttgtcgttttgagtggcattgtttgatgctgattgcccgatgcgacgctgttgcgtcttctcaggcctacgattgtggtgcgttctggggcggacaaggcactcgcgccgcatccgccaacagtcaatcgaattatcagaagccattaacgccgctgatattccgccattcccgctttgcagtccacgctgacctggtaatgaatatcggcacttttaccacgcacggttagcggtacactccatttatcatctttaccctgaatgtcctgcaaactgacccaagccacgggatcggcctgaccgacaattttttgatcatctgcccaacgcgccacgcgattttgttgataatcacgttttacgctcgcggcaattccggcagcatccagatcttcacactttgggaaagtgacgctcttgctggtttcattattggcagcgaaaacacttgcgcaggcagaaaccaacaacagccctaaaaacgcccctctttttttcatgtttttctccatagcacaatgattcaggagaaagcatggtacaaattgtcaggagcgcaagttgcttcaggccgcgtgactggcatcttcctcttcggattcagcaccgacgacctgtggggacggtaatttgccggttttcagaatggtgctcagcacatctttttgttctgccagccataggctaagggcttcacgttgctcgtcttccatttgcactggagaatttgtcagccaggtgtcaagcagatccgccgtatcaagcattttgtcataagcatcggcttcctttttgctggtaaagctcattttctcttcgccctcacgaatgactacgtatttaacttcaaccgccatttgcagcctctcataataactgtgattttatacagtatatttcttttcggttgagaaatcaacatcagcaataaagacacacgcaaacgttttcgtttatactgcgcgcggaattaatcaggggatattcgttatgacgttattaggcactgcgctgcgtccggcagcaactcgcgtgatgttattaggctccggtgaactgggtaaagaagtggcaatcgagtgtcagcgtctcggcgtagaggtgattgccgtcgatcgctatgccgacgcaccagccatgcatgtcgcgcatcgctcccatgtcattaatatgcttgatggtgatgcattacgccgtgtggttgaactggaaaaaccacattatatcgtgccggagatcgaagctattgccaccgatatgctgatccaacttgaagaggaaggactgaatgttgtcccctgcgctcgcgcaacgaaattaacgatgaatcgcgagggtatccgtcgcctggcggcagaagagctgcagctgcccacttccacttatcgttttgccgatagcgaaagccttttccgcgaggcggttgctgacattggctatccctgcattgtaaaaccggtgatgagctcttccggcaaggggcagacgtttattcgttctgcagagcaacttgctcaggcatggaagtacgctcagcaaggcggtcgcgccggagcgggccgcgtaattgttgaaggcgtcgttaagtttgacttcgaaattaccctgctaaccgtcagcgcggtggatggcgtccatttctgtgcaccagtaggtcatcgccaggaagatggcgactaccgtgaatcctggcaaccacagcaaatgagcccgcttgcccttgaacgtgcgcaggagattgcccgtaaagtggtgctggcactgggcggttatgggttgtttggtgtcgagctatttgtctgtggtgatgaggtgattttcagtgaggtctcccctcgtccacatgataccgggatggtgacgttaatttctcaagatctcagtgagtttgccctgcatgtacgtgccttcctcggacttccggttggcgggatccgtcagtatggtcctgcagcttctgccgttattctgccacaactgaccagtcagaatgtcacgtttgataatgtgcagaatgccgtaggcgcagatttgcagattcgtttatttggtaagccggaaattgatggcagccgtcgtctgggggtggcactggctactgcagagagtgttgttgacgccattgaacgcgcgaagcacgccgccggacaggtaaaagtacagggttaaacccggcaaaaaaacgctacaaaaatgcccgatcctcgatcgggcattttgacttttacagcttagcgccttctacagcttcacgcgccagcttagtaatgcggtcgtaatcgcccgcttccagcgcatctgccggaaccagccaggaaccaccgatgcacagcacgcttttcagcgccaggtagtcacggtagttagccggagaaataccacccgtcgggcagaaacggacctgggagaacggacccgcgatcgcctgcagggctttcacgccgccgttagcttcagccgggaagaatttgaactctttcaaaccgtagtccatacccagcatcagttcggaaacagtgctgatccccggaatcagaggaatagtcccttcggtagcagctttcagcagcggctcggtcagacccgggctaattgcgaactgtgcacccgcttcagtgacttctgccagctgctgtggattcagcaccgtaccggcacccacaatcgcttcaggcacttctttggcgatagcacggatagcgtcaactgcacactcggtacgcagagtcacttccagaacgcgcaccccaccagcaaccaacgcttttgccatcggcaccgcgtgttccagtttttttaccacgataaccggtacaaccgggccggtggtcaggatactttctgcacttgttttccagtttttcatcagagttttctctcgcctgattacaaatttgtcgtcttaaaaagtgatacaggttgcgccctgttcggcaccggacagtttttcacgcaaggcgctgaataattcacgtcctgttcccacgcgactcgcgctcaggtcaggaatgtgcggttcgcgagcagccagttccgcttcgtctaccagcagcgtcagttcgcctgtctgtccattcacacgaatgatgtccccgtcgcgcacttttgccagcagcccgccatcgtaggcttctggtgttacgtggatagcactcggcactttaccactagcgccggagagtcgtccatcggtaactaacgcaattttgaaacaccggtccaataatacaccaagtggcggcatgagtttatgtaattctggcattccgttcgcttttggcccctgatgacggacaacaacgacacaatcgcggtccagcaaacccgcttcaaaggccggcataacgtcatgctggctttcaaaaacaaccgctggcgcttcaatcacctggttctcaaccggcacggcagaggttttcataaccgcacggcccaggttaccgcttaacacttttgtcccaccatgatgagagaaaggttgttcgaaggaagcgatcacattgctgtcgagacttttttccgccccttcccgccagtccagttcaccattattcagccatggttcaagggtataacgagacagaccaaaacctgccaccgtattgacatcttcatgcagcaggcctgctttgagcagttcacgcaccagaaccggtacgccacctgccgcctggaagtggttaatatcggccggaccgttcgggtagagacgtgccatcagcggtacaacatcagaaaggtcagagaagtcatcccagttaatctgaataccggccgcgcgcgccatcgccaccaggtgcatggtgtggttagtggaaccaccggtcgccagcagtgcaacgataccgttcaccaccactttctcatcgatcatcttaccgatcggcatccattcattaccattaccggtcatgcgtgtaacctgacgcgcagctgcggcggtcaaagcatcgcgcagcggagaatccggatgaacaaaagaagagcctggcaactgcatccccataaactccaccaccatctggttggtgttggcagtaccgtagaaagtacatgttcccggcgcatggtaagacgcggcttcactctccagtaaggccatgcggtccactttaccttcggcataaagctggcgaatacgcactttttctttatttggcaaaccgcttgccatcggtccagacggcacaaacaccgcaggcaaatgaccaaagctcagggctgccatcgtcagacccgggacaatcttgtcgcacacaccgaggaacagagcaccatcaaacatgttatgggacagccccaccgccgcagacatcgctatcacttcgcggcttagcaggctcaattccattccatcctgcccctgggtgacaccatcacacatcgccggaacaccgcccgcaacctgaccaaccgcattcgcttcatgcagggctttacgaatgatttctggatagtgttcataaggctggtgcgcggagagcatgtcgttataggaggtgatgatggcgatattgttacgcaacatgcttttcaaagaggctttgtcttctggctggcaggcagcgaaaccgtgtgccaggttaccgcatgccaactggctacgatgaacggtgctagttttcgcttgttctatccgggcgagataagcagagcgagtctcgcggctacgttcaatgattcgatttgttacgcgtaacaattgtggattcataaaggctcctgaaattgagttgtcagagcaggatgattcacaacgcgtttcattcagaggatttatgactgaaacgcctgtaaccggagctcatagggcaaaaacgtttcagtcagtgtaataaaaaaagcctcgtgggtgaatccgcacgaggcctgaaagtgtaaaaattgttctacaatctgcgcaagatcatgttaccggtaaaataaccataaaggataagcgcagatattactcaaactcattccaggaacgaccatcacgggtaatcatcgccacgctggcaacgggtccccaggttccggcctgatacggtttcggcgcatcattgtccatcgcccacgcctcagtaatggagtctacccatttccaggcttcttccacttcgtcgcgacgtacaaacagtgcctgaataccacgcatggtttccagcagcaaacgttcataggcatccgccagatgcgtctgattaaaggtttcactatagctcagatccagcttggtgatttgcaggttatgtttgtggtcaaggccaggaactttattcagtacctggatatccacgccttcatcaggttgcagacggatagtcagtttattctgcggcagatcctgccagctttctttaaacagattcagttcaggtgttttgaaatagaccacgacttcagaacatttggtcggcagacgtttaccagtacgcaggtagaatggcacaccggcccagcgccagttatcaatgtcgacgcggatcgccacgaaagtttctgtattgctgctcttgttcgcgccctcttcttccagatatcccggcacttttttgccctgggcgaagcccgcagtatattgcccgcgtacggttttttcgcgtacgttggagcggtcgatgcggcgcagagacttcagtactttcactttttcatcgcggatgctgtctgcgctcaggtcagacggcggagacatcgcaatcatgcaaagaatttgcagcaggtggttctggatcatgtcgcgcatctgaccggctttatcaaaatagccccagcgcccttcgatccccacttcttctgccacggtaatctcaacatgatcaatggtgcgattgtcccagttattcacaaacagggagttagcaaaacgcagcgccaacaggttcagcaccgtttctttaccaagatagtggtcgatacggtaaacctggcactcctcgaagtattcgccaacctgatcattgatttcctggctggtcgccaggctcgtccccagcggtttctccatgactacgcgtgccggtttagcattcagttttgcctcgccaagccctttgcaaattgcgccaaaagtgctgggcggcatggcaaagtagttaatggtgatacgatttttttgatccagcatcgcgccgagacggctgaatgcagcagtgtcattgacatcgagattacaaaaatccagacgtgcactcagggtgtcccataaaccttcatcaatggtttctttcatgaaagtttcgagcgcctcgcggacaactttggtatatgccgctttatcccagtcagcacgccctacgccgataatccgggtgtccgggttgagctgaccggctttttccagttgatacagggaaggcagcaatttacgacgcgcaaggtcgcctttcgcgccgaaaatgaccaggtcacaggcctgggctgtttgcgttaccgccatgtcattctccttaagttaactaacccggtacttaagccagggtatacttgtaattttcttacggtgcactgtactgcttttacgagcttgcgaaaactgtaaacgcttatccacccgtgcgattacgggaaaagcgcgcaaagtgcggcaaaactgataaaaaaatcatcgttttccattgggtaaaaatctgacactgatcatgttatgaaaaaaaataacaacttttttatctgcttttgtcattaacacggcacacaggcgtaatatctgacaaaactgcatttcgatttctttcagtgcggaaatcgtcattacccgtgagtctctttacatcatgaatatgctggaaaaaatccagtctcagctggaacatttgagcaaaagtgagcgcaaagttgccgaggtcattctggctagccccgataacgcgatccatagcagtattgctgctatggcactggaagccaatgttagcgaaccgacggtgaatcgtttctgtcgcagcatggacacgcgcggttttcctgattttaaacttcatctggcacagagtctggcgaatggcactccctatgttaatcgcaatgtcaatgaagatgacagcgttgaaagttacacagggaaaatatttgagtccgcaatggcaacgcttgatcatgtccgtcatagtctggataaatctgccatcaaccgcgccgtcgacttgctcactcaggcaaaaaaaatcgcctttttcggattaggctctagtgccgccgttgcccacgatgcgatgaataagttctttcgttttaatgttccggtggtgtactccgatgatatcgtgctgcaacgcatgagttgtatgaattgtagcgacggagacgtggtggtgctgatttctcacactggaagaacaaaaaatctggtcgagctggcgcagctggcacgcgaaaacgacgccatggtgattgccctcacctctgcgggtaccccgctcgcccgggaagcaacgctggcaattaccctcgacgtaccggaagatactgacatttatatgcccatggtttctcgacttgcacagctgaccgtgatagatgtgctggcgacaggatttactttgcgacgcggtgcaaaattcagagataacttgaagcgggtcaaagaagcgctgaaggaaagccgttttgataagcagttacttaatttaagtgacgatcgctaaaaacgactgtcactgtcctaatcttatacgacatccgaatgagattaatttatcgccatcgcggcgttatttcattcggatttcatgttcaagcaacacctggttgtttcagtcaacggagtattacatgtccagaaggcttcgcagaacaaaaatcgttaccacgttaggcccagcaacagatcgcgataataatcttgaaaaagttatcgcggcgggtgccaacgttgtacgtatgaacttttctcacggcagccctgaagatcacaaaatgcgcgcggataaagttcgtgagattgccgcaaaactggggcgtcatgtggctattctgggtgacctccaggggcccaaaatccgtgtatccacctttaaagaaggcaaagttttcctcaatattggggataaattcctgctcgacgccaacctgggtaaaggtgaaggcgacaaagaaaaagtcggtatcgactacaaaggcctgcctgctgacgtcgtgcctggtgacatcctgctgctggacgatggtcgcgtccagttaaaagtactggaagttcagggcatgaaagtgttcaccgaagtcaccgtcggtggtcccctctccaacaataaaggtatcaacaaacttggcggcggtttgagcgctgaagcgctgaccgaaaaagacaaagcagacattaagactgcggcgttgattggcgtagattacctggctgtctccttcccacgctgtggcgaagatctgaactatgcccgtcgcctggcacgcgatgcaggatgtgatgcgaaaattgttgccaaggttgaacgtgcggaagccgtttgcagccaggatgcaatggatgacatcatcctcgcctctgacgtggtaatggttgcacgtggcgacctcggtgtggaaattggcgacccggaactggtcggcattcagaaagcgttgatccgtcgtgcgcgtcagctaaaccgagcggtaatcacggcgacccagatgatggagagtatgattactaacccgatgccgacgcgtgcagaagtcatggacgtagcaaacgccgttctggatggtactgacgctgtgatgctgtctgcagaaactgccgctgggcagtatccgagtgaaaccgttgcagccatggcgcgcgtttgcctgggtgcggaaaaaatcccgagcatcaacgtttctaaacaccgtctggacgttcagttcgacaatgtggaagaagctattgccatgagtgcaatgtacgcagctaaccacctgaaaggcgttacggcgatcatcaccatgaccgaaagcggtcgtaccgcgctgatgacctcccgtatcagctctggtctgccaattttcgccatgagccgccatgaacgtacgctgaacctgactgctctctatcgtggcgttacgccggtgcactttgatagcgctaatgacggcgtagcagctgccagcgaagcggttaatctgctgcgcgataaaggttacttgatgtctggtgacctggtgattgtcacccagggcgacgtgatgagtaccgtgggttctactaataccacgcgtattttaacggtagagtaagtacgttgccggatgcggcgaaaacgccacatccggcctacagttcaatgatagttcaacagatttcgaatattctgaagcaaacttgaacttatcatcaggcgaaggcctctcctcgcgagaggcttttttatttgatgggataaagatctttgcgcttatacggctggatttcgcccggtttgcgagttttcagcaattttagtatccaggtgtattgttctggtcgcggaccaacaaaaatctcgacttcttcattcatccgccgcgcaatcgtatgatcatccgcctctaacagatcatccatcggtgggcgcacctgaatcgtcagacgatgcgtcttgccatcataaatcggaaacagcggtacaacgcgcgcacggcacactttcatcaaacgaccaatcgcgggcaacgtcgctttataggtggcaaagaaatccacaaattcgctgtgctctgggccatgatcctgatcgggtaaataatatccccagtacccctgacgtacgctctggatgaatggtttaataccgtcatttctcgcatgcagacgaccgccaaagcgacgacgcaccgtgttccagacataatcaaaaaccgggttgccctgattatggaacatcgctgccattttctgcccttggctggccatcagcatggcaggaatatcgacggcccaaccgtgcggcaccagaaagataactttctcgttattacgccgcatctcttcgatgatctccagcccttgccagtcaacgcgcggctgaattttctccggcccgcgtattgccaactcagccatcattgccatcgcttgcggcgcggtggcaaacatctcatcaacaatcgcttcgcgttcagcttcactacgttctggaaagcagaggctcagattgattaacgcacgacggcgactgctttttcccagtcgtccggcaaaacgtcccagccgtgccagaatgggatcacggaactttggcggcgttaaagcgatacccgccatcgctgctacgcccagccatgctccccagtagcgcgggtggcgaaaggatttatcaaactcaggaatgtattcgctattattttttttcgtttccatgcttttccagtttcggataaggcaaaaatcaatctggtgatagtgtagcggcgcaacttgccccgcaccaaataaaaaaagccggtactgactgcgtaccggctgcgaatggatgttaattaatcaaaccgtagctgcggcacaatctctttggcctgcgccaggaattcgcgacgatcggagccggtcagcccttcggtacgcggcagttttgccgtcagcgggtttacggcctgctggtttatccatacttcatagtgcagatgcggcccggtactacgtccggtattaccggaaagcgcgatacggtcgccacgtttcaccttctgtcccggtttcaccagaatcttgcgcaagtgcatataacgcgtggtgtagctgcgaccatgacgaatagccacataataacctgctgcgccactgcgtttggcaaccaccacttcaccgtcacccacactaagcactggcgtaccctgcggcatggcgaaatcaacacctctgtgtggtgcaacgcgaccggtcaccggattagtacgacgcgggttaaaattagagctgatacggaactgtttcgccgtcgggaatcgcaagaatcctttcgccagaccagtaccgttacgatcgtagaatttgccatcttcagcgcggatagcgtaataatctttaccttcactacgcaaacgtacgcccagcagctggctttgctcacgtttaccatcaagcatttctcgagacattaacaccgcaaattcatcgccttttttcagtttgcggaaatccatttgccactgcatggctttaatcactgcgctcacttcggcgctggttaaaccggcgtttctggcgctggcaacaaagcttcccccgacggtacctttcagcagattgttaacccactctccttgctgcatttcgctggtcattttaaaaccgttagcggcagtacggtcataggttcgggtttcacgacgagacacttcccaggtgaggcgctgcagttcgccgtccgcggttaatgtccaggagagttgttgaccgattttcaggttacgcaattctttgtcggccgcagccagttgggtgatatcacccatatcaataccatactgattgagaatgctgcttagcgtatcgccagtggaaacaacatattcatgcacgcccgcttcaccggcgattttgtcatccagttcgtcctggggaatggcttcatcttcttgtgcagcttgatcaatcggctcactggcttcaggtaagaggctacgaatttcgttctgttccagctcaatggttttgacaattggcgtggcatcacggtgataaacataaggccgccagacagcgacggccagagtaagaacggtgaggctccccaacataacgcggtgtggtcgcggtaaattattaaacgccagggcgacagagcgggctatctgttgcacgtaatcacttcctcattaatctcctttcaggcagctcgcatactggttggctaattgactcaggaattcactatagcttgttttacccagtttgatattcgtccccaggggatccaacgttcccatacgaacggatgtccctcgtgcgacgctctcaacgaccgctggcctgaactgtggctcagcaaaaacgcaggttgctttttgctcaaccaactgtgttcttatttcatgtaaacgctgcgcgccaggttgaatctcagggttaacggtaaaatgaccaagcggtgtcagtccaaactgtttttcgaaatagccgtaagcatcgtgaaaaacgaaataacctttccccttgagcggcgcgagctcgttaccaacctgcgtttcggtactggctaattgtgcctcaaaatccttcaggttggcgtcaagtttggctcgactttgcggcataagttccactaattttccatggattgcaaccgctgtagcccgcgctatctctggggaaagccaaagatgcatgttgaaatcgccgtgatggtgatcttcgtcacttttttccgcgtggtcgtgatcatcatcatcgccgtgaatacttttcatcagtagcggtttcacatcttcaagctgcgcaatcgttacctgcttcgctcctggtaatttgcttaccggtttttgcataaacgcttccatctccgggccaacccaaacgactaagtccgcgttctgtaagcgttttacatcgcttgggcgcagactataatcatgttcactagcgccgtcaggaagtaaaacctctgtttctgttaccccatcagcaatggcagaagcgatgaacccaacgggtttaaggctagcgacaacggcggcatctgcggcctgtgttgcacctccccagagagcggcggataatgctgcgaaaagaagcgtttttttatgtaacataatgcgaccaataatcgtaatgaatatgagaagtgtgatattataacatttcatgactactgcaagactaaaattaacatgacaagtctggtttccctggaaaatgtcagcgtttcttttggccaacgccgcgtcctctctgatgtgagcctggaacttaaacctggaaaaattttgactttacttgggccaaatggcgcaggtaagagcacactggtacgggtagtgctcgggctggtaacacccgatgaaggggttatcaagcgcaacggaaaactgcgcatcggctatgtaccgcagaagctgtatctcgacaccacgttgccactgaccgtaaaccgttttttacgcttacgccctggtacacataaagaagatattttgcctgcactgaaacgtgtccaggccgggcacctgattaacgcaccgatgcaaaagctctctggtggcgaaacgcagcgtgtactattagcgcgagcattgttaaatcgcccgcaattattagtgctggatgaacccactcaaggcgtggatgtaaatggccaggtggcgttatatgaccttattgaccaactgcgtcgtgaactggattgtggcgttttaatggtttctcacgatctgcatctggtgatggcaaaaaccgatgaagtgctgtgcctgaatcaccacatttgttgttccggcacaccggaagttgtttccctgcatccggagtttattagtatgtttggtcctcgtggtgctgaacaactgggtatctatcgccatcatcataaccatcgtcacgatttacagggacgaattgttttgcgtcggggaaatgatcgcagttgatttaacgtcggggaaatgatcgctcatgattgaattattatttcccggttggttagccgggatcatgctcgcctgtgccgcgggtccgctgggtagctttgtagtctggcgtcgtatgtcttatttcggtgatacgctggctcatgccagtttacttggcgtcgcgtttggtttgttgctggacgtgaatccattctatgcggtgattgccgttacgctgctgctggcgggcggtctggtatggctggagaagcgtccacagctggcgatcgacacgttattagggattatggcgcacagtgccctgagcctgggcctggtggtcgtgagtctgatgtctaatattcgtgttgatttgatggcttacctgttcggtgatttgctggcagtgacgccagaagatctcatctctattgcgattggcgtggtcatcgtggtggctattttgttctggcaatggcgcaatttgctgagtatgacgataagcccggatctggcgtttgttgatggtgtgaaattacagcgagtgaaattgttgttgatgctggtgacggcattgacgattggtgtagcgatgaaatttgtcggtgcgttgattattactagcttgctgattattcctgctgctactgcgcgtcgctttgcccgcacgccggaacagatggctggtgtcgctgttttggtggggatggtggcagtgactggcggtttaaccttttccgcggtttacgatacgccggcgggtccgagcgtggtgctatgtgcggcactgttatttattctcagtatgatgaaaaagcaggccagctaatctatcgctgaacacatttgtcggatgcggcgcgagcgccttatccgacctacggttcggtatctctggtagtcctggtaagacgcgaacagcgtcgcatcaggcatattgccagtgccggatgcggcgcgagcgaccaatccgacttacggcatttctggcggcgttatgccaaagtgattccacgcccgcgtcgtcgccatacgcccacgcggtgtacgctgcaaaaagccttgctgaatcaaataaggttccagcacatcctcaatggtttcacgttcttcgccaatggctgccgccaggttatccagacctacaggtccaccaaagaacttatcgattaccgccagcaacaatttgcggtccatataatcgaaaccttcagcatcgacattcaacatatccagcgcctgagcagcgatatctgcgctgatggtgccatcgtgcttcacttcggcgaaatcacgcactcgacgcagcagacggttggcaatgcgcggcgtaccgcgagcgcgacgagcaacttccagcgcgccgtcatcactcatctcaagccccataaagcgtgcgctgcgactgacgatatattgcagatccggcacctgataaaactccagacgttgcacaataccaaaacggtcgcgcaacggacttgtcaggctacctgcgcgcgtggttgcaccaatcagggtaaacggcggcaaatcaattttaatggagcgtgccgccggaccttcaccaatcatgatatccagttggtagtcttccattgccgggtacagcacttcttcaacaactgggcttagacggtggatctcatcaataaacagcacgtcatgcggttcaaggttagtgagcatcgcagccaaatcgcccgccttttccagcaccggaccagaagtcgtgcgtaaattaacgcccatttcattggcgacaatgttggcaagcgtagttttacccaaccccggaggaccaaaaatcaacaaatgatcgagggcatcgccgcgcagtttcgctgctttgatgaaaatctccatctgactacgaacctgcggctgaccaacatactcttccagtaatttggggcgaatggcgcgatctgctacatcttccggcaaagtggtaccggcagaaatcagacggtctgcttcaatcatcctttacctcataacgcggcgcgtagggcttcgcgaattaaagtttcactgctggcgtcagggcgagcgattttgctcaccatgcggcttgcttcttgtggtttatagcccagcgccaccagcgcggcaaccgcttcttgttcagcatcgtcggtcgccgggctggcaggagacgtgagtaccaggtcggcggctggcgtaaagagatcgccatgcaaacctttaaatcggtctttcatttcaacaatcaagcgttcggcggtttttttgccaatacccggcagtttcaccagtgcccccacttcttcacgctcaacggcattaacgaactgctgcgcactcattccggagaggatcgccagcgccaacttcgggccgacgccgttggttttgatcaactctttgaacaatgtgcgctcttgtttattgttaaaaccgtacagcagttgcgcgtcttcacgcaccacaaagtgggtgaaaacgatcgcttcctgacccgcttcagggagttcataaaaacaggtcatcggcatatgcacttcatagcctacgccgcccacttcaattaacaccagcgggggttgtttttcaatgatgatgcctctgagtctgcctatcacatgacgctcctgcgtaatgaatcaaagataatgctgtatgataaaaaaatgctggatagatatccagcgaaggatgaagaaaacttgcgaggtgtctcgatgaactgaaaaatggcacagtataatttattctacaggttatattggaagcaaatattttaatattacatattcagtgaagaaatgcgtaataaaaatatacattgcgcctcctgaaaaaataaattttttatgctattacgtatatttgtatctatttcaatggaatgacaacgtgaatattaattaccctgctgaatatgaaattggagatatcgtctttacatgtataggtgctgccttatttggtcaaataagtgctgcaagtaattgctggagtaatcacgtcgggatcattatcggtcataacggtgaagacttcctggttgcagaaagccgggttccccttagtaccatcaccacgctatctcgttttattaaacgtagctctaatcaacgctatgctataaagcgattagacgctgggctgacagaacgacaaaaacaacgaattgttgaacaggttccctcccggctacgcaaactttaccacaccggttttaaatacgaatctagccgccagttctgtagtaaatttgtttttgatatttataaagaagcgctatgtattccggtgggtgaaatagagacgtttggagaattgttaaatagcaatccgaatgcaaaactcactttctggaaattctggttcctgggttctattccgtgggagcgtaaaaccgtcacgccagccagtttgtggcatcatccgggtttggtgttgattcatgcggagggagtggaaacgcctcagccggaactgaccgaggcggtataacttaacgcagtcgccctctcgccaggttcagccggctttcgctcatctgcatcgcattctgactaacgtggcagtgggtgatagcaatcgccagcgcatcggcggcatccgcctgtggattagcgggcagtttcagcaaggtgcggaccatatgctgcacctggcttttttcggcactgccaatacctaccaccgtttgctttacctgacgtgccgcgtattcaaatactggcaactcctgattcaccgccgccacaatcgccacgccgcgcgcctggcccagtttcagggcactgtcagcgttctttgccataaagacttgttcaatggcgaaataatcaggctggaactgggtgatgatttccgtcacgcccgcatagatgagtttcagacgagacggtaaatcatccactttggtgcggatgcatccgctacccaggtaggacagttgcctacctacctggcggatgacgccgtagccggtcacgcggctacccggatcaatgccgagaataatagccatcacgcgtctccgttttgctgtttagcaggcctcatcagagagtcgctgcgacctcatcagagatttcaccgttatggtaaacttcctgcacgtcgtcgcaatcttccagcatatcgatcagacgcatcagtttcggtgcggtttctgcatccatatcagctttggtagacgggatcatggaaacttccgcgctgtctgctttcagacctgccgcttccagagcgtcgcgcactttacccatttcttcccatgcagtgtagacatcaatcgcgccgtcatcataggtcacaacgtcttcagcacctgcttccagtgctgcttccatgatggtgtcttcatcgcctttctcgaaggagatcacgccttttttgctgaacagataggcaacggaaccatcagtaccgaggttaccgccacatttgctaaatgcatgacgcacttcagcaacggtacggttgcggttgtcagacagacattcaatcatgattgccgtgccgccaggaccgtaaccttcgtagatgatggtttccatgtttgcatcatcatcaccgcccacaccacgtgcaattgcgcggttcagtgtgtcacgggtcatgttgttagacagtgctttatccaccgccgcacgcagacgcgggttagcgtccggatcgccaccgcccagcttagccgcggttaccagctcacgaatgattttagtgaagattttaccgcgcttagcatcctgcgcagctttacgatgtctggtgttggcccatttactatgacctgccataaaaatatctccagatagccctgcctgttcaggcagcgttaattacaaactgttcaatcgcctgccggttgctccaggacttagtgagcgccgccgcagcaggcgcatcaagccacttgtaagccagatgttcagtgaaaacgatctgccgctcgtgcggaagcgcaagacagaaccaactttccgtattacgcgtcacgcccggcgcatagcgatgacgtaaatgactaaaaatttcaaactctaccgtgcgctgacagtcaattaaggtcagttgttcagcgacaacatcaatggtgacctcttcctttacttcgcgcatggcagcttgcggcgcggtttcaccctcttccacgctgccggttacgctctgccagaaatcgggatcgtcacgccgctgcaacatcagcacccgtttcgtatcttgtgcgtagatgaccactaagatgctaacgggacgcttatacactttatccttcacgctgcctcttcgttgactgccttcgctcatcccattcacatagttatctatgctcatgggagttcactcagttgccgcctcgatgcaacgcgaatgatttcgtgtatttgagtcatatcagttattctcagccttcttcacaacctgaatgctcagctcagccagtgcagtcgggttagcaaagctcggtgcttcagtcatcagacacgctgccgccgtggttttcgggaaggcgataacgtcacggatattgtcggtgccggtcagcagcatggtcagacggtcaagaccgaatgccagacctgcgtgcggcggagtaccgtatttcagagcgtcgagcaggaagccgaatttctcgcgctgttcctcttcgttgatacccagaataccaaacaccgtctgctgcatatcaccattatggatacgtacactaccaccgcccacttcgtaaccattgatgaccatatcgtaagcgttcgccaccgcattttccggtgcagctttcagttctgcagccgtcatatctttcggactggtgaacggatggtgcattgccgtcaggccgccttcaccgtcgtcttcaaacatcgggaagtcgataacccacagcggtgcccatttgctttcgtcggtcagaccaaggtctttacccactttcaggcgcagtgcacccatcgcgtcggcaacaattttcttgttgtcggcaccgaagaaaatcatatcgccatcttgcgcggcagtacgatccaggatgtcttcgatgatttctgcattaaggaacttcgctaccgggctgttgataccttccagacctttcgcgcgttcgttaactttgatgtaagccagacctttcgcgccgtagattttaacgaagttaccgtattcgtcgatctgcttacgggtcaggcttgcgccgcccggaacgcgcagagccgctacgcgacctttcggatcgttcgccggacctgcaaatacagcaaactcaacagatttcagcagatcagcaacgtcagtcagttccatcgggttacgcagatccggtttatcagaaccataacggcgttctgcttccgcaaaggtcattaccgggaaatcgcccagatccacacccttcacttccagccacagatgacgcaccagcgcttccatcacttcacgcacttgcggcgcggtcatgaaagaagtttccacatcgatctgagtaaattcaggctgacggtcagcacgcaggtcttcgtcacggaagcatttaacgatctgatagtaacggtcaaaaccggacatcatcagcagctgtttgaacaactgcggggattgcggcagtgcgtagaatttacctttgtgcacacgagaaggcaccaggtagtcacgcgcgccttccggcgtggctttggtcagcatcggagtttcgatgtcgaggaagccgtggtcatccataaaacggcgcaccaggctggtgattttagcgcgggttttcaggcgctgagccatttccggacgacgcaggtcgaggtagcggtatttcagacgcgcttcttcggtgttgacgtggttagagtcaagcggcagaacatctgcgcggttgatgatagtcaggctggacgccagcacttcgatttcgccggtcgccatatcgcggttaatatttttttcgtcacgcgcacgtacggtgcccgtgacctgaatgcagaactcattacgcagttcagaggccagctttaacgcgtccgcacgatccggatcgaaaaatacctgcacgataccttcgcggtcgcgcatatcgatgaagatcaggctaccaagatcacgacgacggttgacccaaccacacagagtcacctgctgccccacgtgggacaaacggagctgtccacaatattctgtacgcatgagatatcccttaacttagctgccggcggatgccccctgctgcgcaggtgaccaagtcgcagcgttagctgtatgtcacaactgaatgaaaaaaggcggctattatactggaaattctgccgcaccgtaagagcctggcccgcgctggaacgcctcgttaccactttatatcgggcctgaaatcagactctacgccagtttgctataaaggtgttgcccgaactcataaaaattaacaaaatttgtcgttccgccatcggctaatcgcattaaggtgtgaggcacgattttgttttttcaggagtcattatgcttgaacttaatgctaaaaccactgcgctggtggtgatcgatttacaagaaggcatcttaccttttgccggtggtccacatactgccgatgaggtagttaatcgcgccgggaagctggcggcgaaatttcgcgccagcggtcagcccgtgtttctggtgcgcgttggctggtctgccgattacgctgaagcattaaaacagccggtcgatgcgcccagtccggctaaagtgttgcccgaaaattggtggcaacatcctgctgcattaggtgcaaccgacagcgatatcgaaatcatcaaacgtcaatggggtgcgttttacggtacggatctggagttgcaattacgccgccgaggtatcgatacaatagtgttatgtgggatcagcaccaatatcggtgttgaatccaccgcccgcaatgcctgggaacttggctttaatctggtgattgccgaagacgcctgtagtgccgccagcgccgagcagcacaataacagtatcaaccatatctacccgcgcatcgcccgtgtgcgtagcgtggaagagatcctcaacgcgttatgatttacatcggtctaccgcaatggagccatcctaaatgggtgcggttggggatcaccagccttgaagagtatgcccgccactttaactgcgtggagggcaacaccacgctttacgccctgccgaaacccgaggttgtcctgcgctggcgtgagcagaccacagatgacttccgcttctgttttaagtttccggcgaccattagccatcaggcagcattacggcattgcgatgatttagtgactgaatttttgacccgcatgagtccgttggctccgcgcattgggcaatactggctgcaactgcctgccacattcggcccacgggagctgcctgcgctttggcattttctcgattctcttcctggcgaatttaattatggcgtggaagtccgccatccacagtttttcgccaaaggagaagaggaacaaacgcttaatcgcggtttacatcagcgcggcgttaatcgggtgattttagacagccgcccggttcatgcagcacgtccacacagtgaagctattcgcgacgctcaacgaaaaaaacctaaagttccggtacatgctgtactgacggcgacaaatccgctgatccgttttatcggtagtgatgatatgacgcaaaaccgggaattatttcaggtctggttacaaaaattagcgcagtggcatcagaccactacgccttatctttttttacatacgccagacattgcccaggcaccggaactggtacataccctgtgggaagacttacgtaaaacgcttccagagatcggagcagttccggctattccacagcaatcttctcttttctgaatttgccacctatcatagacaggtgccatcggccattttaaagggagtttgtatggtaagcgcgctgtacgccgttttaagtgcgttgttattaatgaagttctcttttgatgtcgttcgcctgcgaatgcagtaccgcgttgcctatggcgacggcggttttagcgaactgcaaagcgctattcgcattcatggtaacgcggtggaatatattcccatcgcgattgtgctgatgctgtttatggaaatgaatggcgcagaaacctggatggtgcatatttgcggcatcgttttgcttgctggtcgtctgatgcattattacggttttcatcaccgtctgttccgctggcgacgttccggcatgagcgccacctggtgtgcgctgttgctgatggtgctggcgaatctttggtatatgccctgggagttggttttctccctgcgttaacgcacaatacgccactttctttttcccggatttttacgttatgtctcaccgcgacacgctattttctgcccctatcgccagactgggcgactggacctttgatgaacgggtagctgaagtcttcccggatatgatccagcgttccgtacccggctattccaatattatttccatgattggtatgttagccgagcgcttcgttcaacctggtacgcaggtttacgatctgggttgttctctgggcgcggcgacgctcagcgtgcgtcgcaacattcatcatgataattgcaaaattattgccatcgacaactccccggcgatgattgaacgctgccgtcgtcatattgacgcctataaagcccctacgccagtagacgtcattgaaggtgatattcgcgatatcgccattgaaaacgcaagcatggtggtgctgaattttaccctgcaattcctggaaccttccgagcgccaggcgttactggataaaatttatcaagggctgaaccccggcggcgcgctggtgcttagcgaaaaattcagtttcgaagatgccaaagttggtgaactgttgttcaacatgcaccacgactttaaacgtgccaacggttacagcgaactggagatcagccagaagcgcagcatgctggaaaacgtgatgctgaccgattccgtggaaacccataaagcacgcctgcataacgccggttttgagcatagtgagctgtggttccagtgctttaactttggtagtctggtggcattaaaagcagaggacgctgcatgatcgactttggtaacttttattctctgattgccaaaaatcatcttagtcactggctcgaaacgctgcccgcgcagattgctaactggcagcgcgagcagcagcacgggttgtttaagcagtggagtaatgcggtggagtttctacctgaaattaaaccgtatcgtcttgatttattgcatagcgttacggcagaaagcgaagagccactgagcgcagggcaaattaaacgcattgaaacgctgatgcgcaacctgatgccgtggcgcaaagggccgttcagtctgtatggcgtcaacatcgataccgaatggcgttccgactggaaatgggatcgtgttctgccccatctttctgatttaaccggacgcaccattctggatgtcggctgcggcagcggttatcacatgtggcgcatgattggcgcaggcgcgcacctcgcggtggggatcgaccctacgcaactgtttctgtgccagtttgaagcggtgcgtaaactactgggtaatgatcagcgcgcgcatttgttaccgttaggtattgaacaacttccggcactgaaagcctttgataccgtctttagcatgggcgtgctttaccatcgccgtagtccgctggagcatctatggcagttgaaagatcaactggtcaatgaaggtgaactggtgctggaaacgctggttattgatggtgatgagaacacggtgctggtaccaggcgatcgttacgcgcaaatgcgtaatgtctatttcatcccttccgcgctggcgctgaaaaactggctgaagaagtgtggttttgtagatatccgcattgcggatgtgagcgttaccaccacagaagagcagcgacgcaccgaatggatggttaccgaaagcctggccgatttcctcgacccacatgatccgggtaaaacggtggaaggttatccggcacctaaacgcgcggtgctgattgcgcgcaagccgtaaaggtctggtattactgccggatgcggcgtgaacgccttatccggcctacaaaaccttgctaattcaatatattgcagggactatgtaggcctgataagcatagcgcatcaggcagctttacgtttgcataacctcagcgcccgtttccgggcgctattcacgtcttacgcctgaacagctggctgatcaaacgccgttaacttcggtgcattgcccgtatatttttcgatatacaccaacgcactgttaccggcacaggcatttgccagctggctgctggggatatccgccgttaacacgttcgcactgccgtttttacacaagccattttccagatctggccatgcaccttcatgcacgcataccacgccttttttgatcccgtcagtcaccaccgcgcctgtcaaaatctgaccacgtttgttccagacacgcaccagatcgccattcgcaataccaaagcgtgcagcatcttcggtgtgaatagtgattggttcacgatcggcgatcgcatattttttacgcagttccgcatagttaagctgactgtgtaaacggtgtgccggatgtgcggtcagaagctgtaactgcttctcgtcggcggtacctttccattcatcaggagccagccaggttgggtgtgccgggcaatccttatagccaaatttttccaacgttttactatagatttcaattttgccgcttggcgtacccagcgcatttttcaccggatcggcgcggaaatcaccataacgaacgtactgttcgttcttctcgctgtggcgcatttcgatcagtttattttgctgccagaaggcattaaacattggcatagtgacgcgttgcgcacgggcacctttctgagcggcatcatagaaaaatttcagccacgccatttcatctttaccttcggtatagatctcttttccgccaggtttgagtaattccgcaagatcggcaaacacgtcaaaatcgttacgcgcttcaaattgcggagcaacagcctgcttcatcggcacaatatgctggttgctgtaatcaccggtcatcgtcaagtcattgcgctcaaagcttgtggtgatcggtaatacgatatctgcgtgtttggctgctgcggtccagtagcattcagaaacgacgatcatctccggtttctgccatgctttaatcagacgattagtatcctggtgatgggtaaagttaccgccacccgcccaccagatcattttgatattcggatacgtttgttctttaccgttatgctgatatttgccgccaggattttccagcgcatcgacgatacgggcaacaggaatcgccgtcattccgccatcatcagcggcctcgctggcatgtccggcaatcgccgcagacatttccggcagcacgccgccaacacgcgtcgggttgccaccgttggagtaatgataagagaaaccaaaaccgccgcccggtgtaccaatctgccctaacatcgccgccagcgtcaccagcatccagtgtttctgttcaccatattgctggcgctgaattccccagcctgccatcagcattgtgcgattcgccgccatcagttcagcgagtttgactatctgcgcttccggtacgccagtaatttccgccgcccagaccgcgctcttcggcgtattatcgctcttacctgtcagatactcttcaaactgcggatacccggtagtgtatttttcaaggaacactttatcgtgtttgccttgtgtcatcagggtatgcgcaatccctaacatcagtgccacgtcggtgcccatattcggcgcgatccaggtggcattatcgtcaaagaattcgatggtttcggagcggataggatcaatggcaatcactggtttgccagattttttcagctgatggaagtattccagcccttgctcatcggtactgctccaggcaatttttaaggtattcagcgggttcattccccacagcaccacaacctggctgttttccagaatcagcggccaggaggtctgctgttcatacacctctacagaaccgaccacatgcggcatgatcacctgtgctgccccggtactataatcgccgctatgcccggaataaccgcccgccaggttcatataacgttgcagtaaggtttgcgctttatgcaacacgccagaagagcgccagccgtaagatccggcaaaaatggcgcttggtccgttagctttacgaatacgatcatgttgctcatgaatcagttttaatgcctgttcccagctcacctgtacataggtatcttcgccacgacctttcgccggttgcagtggattatcgagatagctttttctcaccatcggatgctgaatacgcgccgtggtgtgtacctgatccgccgccgtagactgtaaggaattcggtatggttttcgccagcgcgcctgtactagaaacaatcttgccgtccttcacttctacgttcatcgctccccaacgtcccgcggtgaggattttaccgcccttctcttctgcccatgcggggagcggtgctgcgcttgtcaccaccagcgctccagcggcaataccgctgtgtttaataaattcacgtcttgttaatgtcataacttcctccctgatcaacgaggatcactgtttctcggtaatatctttggcgttgtactggaaataccgcgttaaaatgtccagttcgttttcgctcatgctggttcgtgcccccattcctttggcaatggacggccacgcattgacggtgtaatggtcggcggcaataggggcatgacaaccagcgcaataggtatcgtcaagtttttcagcgtattgccatagcggtttacggtccgctaatgcgggatcggtaagcgcaccctgtaaagacgcctgacgccattgattgccgtattcgtcagcctgccattccccgtttacagtgagcgccttgataccttcttcacttaatgtggctagcgccagccgttgacctgccgccaggtagagcgtgttttcactgccctgcatttgataaccctgcaacagaacgatcggctgtttgccactggcatcaacgacggtgagatcggttccaggattcacggtagccagctcgcctatgtgagaagttttgaaaggataaatatgtgcgccattagtaacactagtagcggcctgactttccagctcatgcgccgcgttgtcatccatttttatttctggcggaaaatgggcaatgcctttatgacaatcgatacaggtttcgctgtccttttgtgctttgttatgcattttctgcgcagattcactttggctggcaatatccatggcatcaaaagaatggcaactacggcacgttgcagagtcagtggcttttaattctttccatactgtttcggccatttcctggcgatgagcttcgaacttatcgtcactgtctattttgccgctaacaaattcatgataaatatctttagatgcctttaatttagcaaataaataatccatcccactctttggaatatggcaatcggcacattccgcacgtatccctttctggttgctaaagtggacagttccctgatattcctcaaaaggtttactcatgctgtggcaggaaaggcaaaatgctgtatcgctcgttttatgtaagactttttgcgccagcaataacccgccgccaccaaccacaaccgctatcagcaaaaacaataacccaatgcgttttttccctcgcatagattcctctaattaaattactggacaccgaaatcattgtataattaaatatacaacgaattaaccgcttgcataattaggcacaacactgcctgaaacaatcgataaagaatatgatttattacaatgtaatcattaattgctaaggaataacccagttgctatttagaatatatatttatcagttttagtaatttaaatcccataattaatgtgaatatatacaatatttttagcacaacgctatgcgcactgtcacccgctcaacagatcacggttatcgttcgttttttatactgttcagggataaaaaaaggcccctgttgaaattgcaggggcctggtacgagcaagcatcatattgggcgacatgatgcaacggtaaaaatcatttggcctgatggcgttcaatgattcctttcatttcagcaaccgccgccccgtctacgatataacggctatactcgtccgcgtgttcatcactactcatggacaatccttgattacgataacgcatcggactggcttgccacgctcccgcggagctatggacttccagcactccggcatcgaggaagtggtgcaggttttctgcacggactcctgctccggccataatgattggagcatcacgatgggcaataagttccataattttacttaaaccttgcagtgcgtcacttttttgcccacttgtcagtacccgggcaatgcccaattccgcaagattattgagtgtatataaagggttagcgcacatatcgaaggcgcgatgaaaagtcactgccagcggaccggcagcagccattattttttccattcgtggcatatcgacattcccgtcaacatcgagaacgcccgtcaccagtccaggaaaacctaattcgcggaccgtgcgcacatcctcaagaatggcggcaaactcaccgtcgctgtagcaaaaatcaccaccgcgtgggcgaattatcggatgcacagggatcgtcacccgctggcgcacggatttcagtacacccaagctcggcgttaagcccccctcttttggggctgcgcataattcaactctgtctgcgccgttttgctgcgccgttagtgcacattccatgctgtaacagcaaatttccagtaatgccatttttactccttaattacgcgctctgctcgctggcaacgatctcttcaatggaccacggatgaaacttaatagttgttttgccatcggtgaccgccagcgtcggattcggtaatcgctcatgctcaccttttgggctactggttttcacactgatccccggtaggctgagtccttcatcagaaagcaatgccagcgcacgggcattcagcgtttctggatcacccggcagaacgatttcaatatgttcccaaccttcgtgtgggtaacgtttttccccgggccacggtagctccacaatagaaaactgccagtgcgcaacctgtaccggttcatgcaatttaaacagacaaatcggtctgccattgatcatattttcactcaaaagctcgccacactgttcaaacccgcgacgccagcgttcagcagtggcgttttgatggcaacgcaaagaaatgtgatcggcagtcagcggagtgatattcaaccccagacggcgggaaagttcatctaatgcgtggataaatcgcggtaaatcgcttgcaatatcctgcagctcgtcgatagattgccagttcgccataatcactcttcgtctttcagtaaaagcgttaatttaccctgttgccctgtgccaaccaaccgctgatttcacgccgcttctgatgcaatagtgaaaacggcaatacgccacgcgcacgttgctgacgaaaacagccatttgcagtatactcccgccctaatttctttaactggtgcgggcaatttttgctcgcttcatcaatgtaaggtattccggtgaatattcaggctcttctcagtgaaaaagtccgtcaggccatgattgcggcaggcgcgcctgcggattgcgaaccgcaggttcgtcagagtgcaaaagttcagttcggcgactatcaggctaacggcatgatggcagttgctaaaaaactgggtatggcaccgcgacaattagcagagcaggtgctgactcatctggatcttaacggtatcgccagcaaagttgagatcgccggtccaggctttatcaacattttccttgatccggcattcctggctgaacatgttcagcaggcgctggcgtccgatcgtctcggtgttgctacgccagaaaaacagaccattgtggttgactactctgcgccaaacgtggcgaaagagatgcatgtcggtcacctgcgctctaccattattggtgacgcagcagtgcgtactctggagttcctcggtcacaaagtgattcgcgcaaaccacgtcggcgactggggcactcagttcggtatgctgattgcatggctggaaaagcagcagcaggaaaacgccggtgaaatggagctggctgaccttgaaggtttctaccgcgatgcgaaaaagcattacgatgaagatgaagagttcgccgagcgcgcacgtaactacgtggtaaaactgcaaagcggtgacgaatatttccgcgagatgtggcgcaaactggtcgacatcaccatgacgcagaaccagatcacctacgatcgtctcaacgtgacgctgacccgtgatgacgtgatgggcgaaagcctctacaacccgatgctgccaggaattgtggcggatctcaaagccaaaggtctggcagtagaaagcgaaggggcgaccgtcgtattccttgatgagtttaaaaacaaggaaggcgaaccgatgggcgtgatcattcagaagaaagatggcggctatctctacaccaccactgatatcgcctgtgcgaaatatcgttatgaaacactgcatgccgatcgcgtgctgtattacatcgactcccgtcagcatcaacacctgatgcaggcatgggcgatcgtccgtaaagcaggctatgtaccggaatccgtaccgctggaacaccacatgttcggcatgatgctgggtaaagacggcaaaccgttcaaaacccgcgcgggtggtacagtgaaactggccgatctgctggatgaagccctggaacgtgcacgccgtctggtggcagaaaagaacccggatatgccagccgacgagctggaaaaactggctaacgcggttggtattggtgcggtgaaatatgcggatctctccaaaaaccgcaccacggactacatcttcgactgggacaacatgctggcgtttgagggtaataccgcgccatacatgcagtatgcatacacgcgtgtattgtccgtgttccgtaaagcagaaattgacgaagagcaactggctgcagctccggttatcatccgtgaagatcgtgaagcgcaactggcagctcgcctgctgcagtttgaagaaaccctcaccgtggttgcccgtgaaggcacgccgcatgtaatgtgtgcttacctgtacgatctggccggtctgttctctggcttctacgagcactgcccgatcctcagcgcagaaaacgaagaagtgcgtaacagccgtctaaaactggcacaactgacggcgaagacgctgaagctgggtctggatacgctgggtattgagactgtagagcgtatgtaatcgatttttcgtgagagtgaagcctgatcagggttagccgatcaggcttttttattgccatctaaatgtattctgaaaatggacatgccattgttttctcactgttggataagaggccagaagcgtaatatccggccccagggaaacgataacggttgaatttaaggaataccgcagtgtttaaatttcttgtattaacattaggcattatctcttgccaggcttacgcagaagatacggttatagtaaacgaccatgacattagtgccatcaaagattgttggcaaaaaaatagtgatgatgatactgacgttaacgtgatcaaaagttgcctgcgacaagaatacaatctcgtcgatgcgcaattaaataaagcctatggtgaagcttatcgttatatagaacaagtgccacgcacaggtgtaaaaaaacctgataccgaacaacttaacttgcttaaaaaaagtcagcgagcctggctggattttagggacaaagaatgtgaattaatccttagtaatgaggacgttcaggatttaagtgacccttattctgaaagtgaatggctcagttgtatgatcatacagaccaatacgcgaactcgccagttgcagctataccgtaactctgaagatttttatccaagccctttgacaagaggataattcacatctttttggcatgttttgttgcaagctattcctgataaataattgcaacaagacatcgagcctttttcactgagttattaaacatactcgcgagcgcgtcgctacgctagcaagcaaaaatgaaacaggaataatcgaaatgggatgttgcgcacagtcaaaataactcaccgtaaataatcatctgctataaataatcactttcatgcaataccagataagctatttttaaacagacacttaccgcacaacaaactaattaaatacaaagaaaggcaacaatcaacttaatgttaatgaaatgttttacatatattaaccacttgtttaatgcggagaatcagtacactattttcttataattacatttgaaattatatgatcaccgggagtgattgattaattatctttactaataatcagactaatatttacctgtttgaccgagttgggattgcgtcgtttctccattaggagtaaagctttaatgtcacctgaagttcacagaataaggaacaggttatgagctatagcaatattcttgtcgctgttgcggttacaccggaaagtcagcaactgctggcaaaagcggtatctatcgccaggccagtaaagggacacatcagtttaattactctcgcttccgacccggaaatgtacaatcaattagctgcgccgatgcttgaagatttacgcagcgtgatgcatgaagaaacgcaaagctttcttgataagttaattcaggatgcggggtatcccgttgacaagacgtttattgcctacggtgagttaagcgaacatattctggaagtatgtcacaagcatcatttcgatttggtgatttgcggtaatcacaatcacagtttctttagccgagcatcctgcagcgcgaaaagagttattgccagtagtgaggtcgatgtgctgttagttccacttacgggagattaaccgctcttacgcaagctttggaaaggtagcaactttatcgcgctgctggctttccgcgcttcgcggaactatctgctttaggtcgctaatgaagcactcctgccagtggttaatatcgtttttcacgataacgtccagcatttctgcatgacgggaaatacgttccgccaggctcatagtcaatgcacgatccagcgcagctgcaacttcgtcacgatcgtaggggttaacaattaacgcgctcgttaactcgtttgccgctcccgcaaattggctaagaacaagaacgcccggattggctgggtcctgagcagcaacatactcttttgctaccaggttcatcccgtcacgcagtggcgtcactaagcccacgtcagagtagcggaatattttcatcagtaatttacggtcaaaatgctgattcaaataataaagcggcgtccagcctaattgcccgtatttaccattaattcgtccagcttcattttcgagctgatgacgaatatcctgataggcttgcacatcaccacggctcgttggtgcaatctgggtataacgaattttaccatgatgctgcggatatttttccagcaacgcttcataggcgagaaaacgctctggcaaacctttggaataatccagccgttcgacagaaaagatattttgtacgtttttcagttccgctttaagttgcgccagttttggcggcagtggcccggcagcctgtttggctatttctttcggttcaatgccgatcgggtagacttctgttcgaaatgctttgccccaggctgtatggctttttgcgctacgtgtcgtgacgcgggtcaggttagaaagacaatccaggaacgccagacgatcgttttctgtctggaaacccagcaaatcataatcacaaagctgttcaagcaaggtgtcatatgtcggcagcgcgttgaagatttccggtgtcgggaaaggaatatgcagaaagaaaccaatgcgattattcactccccgtttgcgtaattcatgcgcaaatggcaacaggtgataatcgtggatccagataatgtcatcgtcttgcaacagcggcagtaatttatctgccagcaacgcatttacgcgtagatagccgtcccaggcaggacgctgaaattgcaccagatcgagccgataatgaaaagcgggccagagaacggcattggagaattggttgtagtattcgtcaaggtcctgttcgctgaggttaaaagaggcccacgtaatgttaccttttttcaccttttttagcggctgatcctcattccctgtttcaccactccagccaaaccacagtccgcctgcggctttcagtgcccccagtatgccaacggcaaggccaccggcactggcggcgtgctcgtctggtggtgcaatccggttagatactacgactaaacgactcatagtcatcactcctgttatttttacttagatactacgactaaagctctcatagtcatcactcctgttattttctcttttttgttgtaatgcggtggttatcatttcaagccagctccagacatccggcacacccgccagtcgccaacttgcctgagttgcacctgtgccaatttttacactcattccgcccagtcggttaacgactgcgaagccagattcatcggttaaatcatcgcccagaaatacgggcgttcgcccgataaagggagcttcctgcataaaagctgcaattgcctcacctttactggtacctctcggtttgatctcgacaacacactttccctgctgtaacgccatttgtggccagatctgagtaatacgttgcgctaatgtcattaatgcgtcttcatgctgcggagcctgacgataatgcagcgcaaaagccatccctttcgcctccagctccgcgccgggatactgagcgatgactgtatgcagttgcacgctaatatcacgcgcaatcgcatccggcagatgaacgatatgtgttttaccattgatgtcacggcgctccgccccatgcacgcccgctaacgggaagcgataaggttttgccagtgcgtcaagctccaccatactgcgcccacttatcaatgccaatgcaccatcacttgcggttgccagtagctgtagtccttgcagaatattgtcaggcacgacgacctgatcgggatgcggtttgatttccgccagcgttccatcaagatcaaaaaaccaggcatatttcgcggatagttcaggggtttcggttaacggttctgtcacccggttctcctccttctcttttcttattgtgttgcgcagaacgcgctttacagacatgtaagtatagacagtgtgacgggggtcgccatttgcaacgaagaacagccaaccgttatggcggttggctatggtgggaaaaaacgctaaattgttgcagaaaaaagcatcagacagtgcgtttcgctttttgcttgtaacggtcgaagatcaccgctgccagcaggattaagccgcgaaccacgtactgcgcgaaaggagaaatattaagcaggttcatggcgttttccacggtgcctaaaattaagatacccgccaccacataactgatttttccgatgccacctttcagagaaacgccacctaaaacgcaggcggagataacaatcagctcataaccaatgctcgtcattggctgcccactggtcatacgactagccagaataattccggctatcgcacttaccaggccactgagaacaaagataataattttggtgcgaacaaccggtacacccgccagacgcgcggcctcttcgttcccgccaatcgccagggtgttacgaccaaaggtggttttattcagcagcaaaccaaagataatcagacacgcgacggtgagccagattggcgcaggcagaccgaaccagttggcgtaaccaagggcaaagaagctttcatcttcgataccgaccgctttaccgtcactaatgatgtacgccagacctcgaacaatctgcatcgttgccaatgtcgtgatcagagcatttattttcagtttggcgataacaaagccattgaccaggccacagagaacgcccagcaacaaccccgctgccacgccaatccacaggctttcagtcaggttaataaccaccgccgtggtgacacccgcacaggcaattacggaggcgacagaaaggtcaaagtcaccggaagcgaggcagaacaacatgccacaagccaccatcccgctcatggaaattgccaggcccaaccctttcatattaatgaaggtggcaaaatttgggacaaaaatggcacaggcgataaagagcaccgcaaacaccaccagcatgccgtactgatcccagatacgcccgaagctgaaactgctcttaggtgcgccagacccgcttgtagaaacagaagacatcatactctccttactcaggcaacagcctggctgactttaggcatcgcaaggctcagtgcctgacgctcatctgcctgctcgtgtaacaattcaccggcgatttcaccttcccgcatcaccacaatccggtcggcaacgccgaggacttcaggtaagtcgctggaggcaaacagcaccgccacgccctgcgccgccagcgcataaattacgttatatatttcgtgcttagcgccaacatcaatgccgcgcgtaggttcatccagcaaaatgaccttcatctcttcgcttaaccagcggcccagaatggctttttgctgatttccgccactgagattcatgatcagttgctccgcgcccggcgttttgatgttgaggctacgaatgtggtgatcggcattgttttcttcccaaccgttgttgattacacaaccgccgagcacatgtttacgtctggcactgatgttgatattgtcgcgaacggagtgcacgggaataatgccttccgctttgcgatcttccgggcagagcatcatgcctgcggcaatggcgtggctcggtttacgaatatcgatcggctgttggtcgatataaacctgaccggcggtgatttgcgtcccgccaaacatgcctttcattaattcgctacgccccgcccctaccagaccaaacagcccaacaatttcaccactgcgaaccgccagacttattggcgtacgcacgcctggtgctttcacagcatcaagacgtaggcgctcctcgccataactacgcggttgccagccgtagatatcgccaatgtcgcgcccgaccatcgcctgcaccagcgcgtcgtggtcaacctgctgcatatcggtaaaggttttgacataacgtccatctttaaagacagtaatggcatcgctgagggcaaatatttcttccatacggtgagaaacgtataagattacccgcccctcttttcgcagttcacgaataacgcggaaaagattgtcgatttcacgggcagagagggagctggttggctcatcaaaggcgataattttggcgttacgcgccagcgctttggcgatttcaaccatctgccactgaccaatggagagatatttcagcggcgtgtccgggtcaatatccataccaagatgtttaagttgtaaacccgcctcataattcagcaaactgcgattcacaatgccgcctttatgcggcagctggccgagatagatgttttccgcgacggtcatttccggcacgagatgcagttcctggtaaataatcgccacgcccgcgttaagtgctgcggtcgtgtcggaaaaggacatttcctgcccattaatcactacagaacccgtggttggcgcatagttgccgctgaggatttttaagagagtactttttcctgcgccattttcacccatcaacgcatgaacctgaccggcatagcagtcaaaactaatatccgtcagcgccttaacgccgggaaacgttttaccgatgccgcgaaaactgagatacggggtagactgttgcataacgtctccgtgaatcactggtcgttcacaccccctctgcatcatgcagaggggaatttttccggcaaattacttaccgcctaaaccttttttctccagttcttctttaaagttgtcacgcgtgatcagtaccacgtcggtaacttcggtaaattttggcggttcaacgtcttttgctacccagttgtaaagcatttcgctggatttatagccatgtacgtccgggcttggcagcagggaaccgtagaagccggttgcctgtgctttagacagttcgctcaccgcatccacaccgttaatgccaatgccgatgatatcggccgctttaaagccctgaccttccgtcgcgcgtacgccgcccagcacggtgctgtcgttcataccgacgatcagccaatgtttaacttccggatgttgaaccagcatactgttggcagcgtcaaatgcccccgggatgtcgttagatttggtaggtacctgataaatttgtttttccgggaatccggccgctttcagcgcatccatagatcccgtagtacggcggcgggcggtatccagttcgttggcggtaatcgccatcaccgcgctttctttgacatcccagccacgtttctgcatctctttatacagttcctggccctgacgttcgccaattttagtcgccgccatcatcaccagcggaacggtatccattggcttacctttggcgttaacaaactggtcatccacggcaatgactttcatatcgtagccacgcgctttcgcgacgatggcagagccgagtttggggtccggagtacaaataacgaaaccttttgcgccactggcagccaggctgtcgatcgcgttcaatgttttttcgccatccggcacggcaatcttaataacctcaaaccctaaatccttcccggctttatcggcaaacttccattcggtctggaaccacggctcttccggttgcttcaccagaaaaccgagcttcaggttctccgccatagcggattgactcataacggctgccagaccaatggctgccagggctttagtaaatttgtgcatggttctctccagctttagtgtcgttttgtgtagggcaaaaacgaatgacattcgttaaattaatcggaaaacaaagcattaccttttaactaaaagataagtgactgtgttgacatagttttagcgagaaattaattctccataggagagcaatatcacatcgcagaattacagtgagaacgtgcataaatttagcgggaaaagacataagggaaagccaatttgtcagacaaattgtcgaatgcacagcagattaatccataagattagcctggaaatccttgttgtctttggtacccatgcgggatgtcttctttttaaccagtcaataggccgcattacctggcgttgagtttttgaaatggtgtaataaccgcaactcaaagatgtggaaaatgcacgtcattcatttcgtcattaattatcactgtgctcattaattaacagaacacgtataatgagagccatctcgcaaaaatgaaaaaacgttttataaaatcatcacttcatcatgaattcaaattcattgattaatatcaacaagatacaaaaagcactatcattaaaattcattgcagttacattgatttcatcaatgaaatgtaaaaatatataaacttgatgatttaagcattttcttatacccgttcagacgttattcttatttcagatcatcgtcagaattgactccacgatcacatttcggaccggcagaaaggaattattctgcaaacagtaattatggtgttttgatttatcttgcacctctccacttctggatataaggatattaggtatggcaaccgctggaatgcttctcaaactcaactctcaaatgaaccgcgagttttacgcatccaatctctaccttcacctgagtaactggtgttctgaacagagtctgaacggcaccgccactttccttcgcgcccaggcacagagtaatgtgacccaaatgatgcgcatgtttaactttatgaagagtgtcggcgctacccccatcgttaaagccattgatgttcccggtgaaaaactgaactctctggaagaactgttccaaaaaacgatggaagaatacgagcaacgttctagtacgttggcacagttagccgatgaagcgaaagaactgaatgatgatagtaccgtcaatttcctgcgcgatctggaaaaagaacagcagcatgatggtctgttgctgcaaaccattcttgatgaagtgcgcagtgcgaaacttgcgggtatgtgccctgtgcagaccgaccaacatgttctgaatgtcgtgagtcaccagctgcattgatcatcatcggcgctaatgcattgcgccgatgaaggttttgagaaaccgctgcctcatctgtttgaagcagcggtttttttaatgggattcaccctgtggggtaaacttgagttcaataagcgcgatggctttttggattgcccgcatggtgaccgggtctgcggcggcgggatggttagtaaagtcgatattcttcagctgactggacattttttcacgaacttcaacgggcgcgattacatcgagaacatccagaatttgtttgataaccaactggcaagcaaccacatcagaaaccaattcctgatcggcattcagcggctgggacatcgtaaactcctgatagcattttgaaagccgttatagtagcgacttcacatcttcagcgatagtcacatccaccgtcatcaggacacaaaaaaacctgccggagcaggttttttgttatcggaacatattgcctggcggtacgtctttgaacgtcttgcaatagttattgaacatacttttcaggattttgcgcagtttcatcgcggcactccgaccatttgttatacaggtgttattgtctttgcgcttataatatgacaaccatcacaaaaatcaatctttatgtgatacaaatcacataaatacccctttaatgttataaaaatgataatcaaaaaacagcccccctatttctgacacctacagatggcaagaaatagcgcctgccaggcgtcttttccggccattgtcgcagcactgtaacgcgtaaaatagtgctttctcttactcttctggctggaccatgagacttctgattctgactcttagtttaataacgctggcggggtgtacggttactcgccaagcccatgtgagcgaagttgacgcggcaacaggtattgtacggttagtttatgaccaggcttttttgcagcatgcccataccgatcgttatgtcagtcgcgggatcgccgatcgcgcatgccagcaggaaggctatacccacgcggtcccctttggtcagccagtaggcaactgtagcctttttgcgggttccttatgtttgaatacggaattcactttgagttatcagtgccatcattccgccttccctgtctttctctaaatattttaatcagcgaggggatcttcgctgattaaagaaatagcggtaatgcgttttattcccattcgtatttttaataattgaagtttatattttaccttttgcaaataataaaataacaaattatagtgacgccacagcaacaaatataacctttgtggagcactatcatgctgaaaccagaaatgattgaaaaacttaatgagcagatgaacctggaactgtactctagtctgctttatcagcaaatgagcgcctggtgcagctatcataccttcgaaggtgctgccgcgttcctgcgccgtcacgcccaggaagagatgacgcatatgcagcgtctgtttgattacctgactgataccggcaatttaccgcgtattaataccgttgaatctccgtttgctgaatattccagtcttgatgaattattccaggaaacctataaacacgaacaattaatcacccagaaaattaacgaactggctcatgctgcaatgaccaatcaggactacccaacatttaatttcctgcaatggtatgtttctgagcagcatgaagaagagaaactgttcaaaagcattattgataaattaagcctggcaggcaaaagcggcgaaggtctgtattttatcgacaaagaactctctaccctcgacacacaaaactaatgctctccggcggcaggtttactgccgccgtttcaaatcagtgacggcaaatcttactctgatcggtgctaaaaccgtctttgctaggtataaatttgccttttgctgccagaaacgctaccagctctcccgctgtcatcccttctgcgctgcaggtgtgaaaacgtgcctgttcaccaaaacgcgctttaatcgcagcttccagactggcatgcgtatattgctcgccactttcaatcatcatatttaacacttcatgaccgtgaatagagtccatcgtccctcctcaaaaaaagcctagcgtagcgattgccgcttatgaagactttgcgccagcgcaggactgaatgctttttattgtacatttatatttacaccatatgtaacgtcggtttgacgaagcagccgttatgccttaacctgcgccgcagatatcactcataaagatcgtcaggacagaagaaagcgtgaaaaacagaaccctgggaagtgtttttatcgtggcgggaaccacaattggcgcaggcatgctggcaatgccgctggctgcggccggtgttggttttagcgttacgttaatcttgttgattgggctttgggcgttgatgtgctacacggcgctattactgctggaggtgtaccagcatgttccggcagataccggtctgggcacgctggcaaaacgctatctgggacgctacggtcaatggctgacgggcttcagtatgatgttcttaatgtatgctctgactgcggcatacatcagcggtgccggtgaattgttggcctccagcatcagcgactggacaggtatttctatgagcgcaaccgctggcgtgctgttgttcacttttgttgccggtggcgtggtttgtgtcggaactagtctggtcgatttatttaaccgttttctgttcagcgccaagattatttttctggtggtaatgctggtactactgctgccgcatattcacaaagtgaatcttttaaccctgccgttgcaacaggggctggctctgtctgcaatcccggtgatttttacgagctttggttttcacggtagcgtgccgagtattgtcagctatatggatggcaacattcgtaagctacgctgggtgtttataatcggtagtgcgatccccctggtggcatatattttctggcaggtggcgacgcttggcagcattgatagtacaacctttatgggattgctggctaatcatgctggattaaacgggctgttacaggcgttacgcgaaatggtggcctctccgcatgttgagctggcagtgcatttatttgctgatttagccctcgccacgagttttctcggcgttgcgttaggcttatttgattatctggctgatttatttcagcgtagtaataccgttggtggacggttgcaaactggtgcaattacgtttctgccgccgttggcgtttgcactgttttatccacgaggatttgtgatggcgctgggttacgccggtgtggcgctggcggtactggcattgattatccctagcctgttgacctggcaaagcagaaagcacaatcctcaggcgggttaccgggtcaaaggtggtcgtccggcgctggtggtggtgtttctctgtggtattgctgtgattggcgtgcaatttttgattgcggcagggttgttaccagaagtggggtgatcagatagcctcaaattccttattgggtgccagaattaacgctgacacccaatttggcctcttaatgcaggcagcactgcttaaatttcttaccactaccgcacgggcaaggatcgttacgccccggtttctcttctgctttgatcggttgctgaacagctttttcctgcggatgcgccatccagtacgcatgtagatcaagcgccgccagtcgaatggcatctacgctctcttcaaacgcttctgggctcatcttttctacccgctcgaagttttcctcagtaccgtgcagcgcaatcgcctccagcgctggttttaagctatcgggcaacgtactccagtcagaaagtgccacgccccgcatatagccaaagcaccactcctcaacaatcgtcagctcgctgccatcaacttctcgcaagccgaataacggctcaaactgctccgggaattcgttcagacgctctgcggtatcggccatatgttgaaaagccagattcataaagcgcgtcatctctttctcactcgcccagcgcggcacatagtcagccccaccccacacggcaaccagccactgttccggttcaatctcttgcggagaactcaacaccgccgtcaataaaccgtccagctccgccacatcaaggatggcgtggtcagtgttgtatttggtcagaatatcgtccagccattccaactcactttcgtttaacggtcccgttttcatacgcttttccttgtggatctcaactcgccagcacctatcttacatgccggtccgtatcagagatactttttgagtggctttgctggtgattaaaaattaaggagggtgtaacgacaagttgcaggcacaaaaaaaccacccgaaggtggtttcacgacactgcttattgctttgattttattcttatctttcccatggtacccggagcgggacttgaacccgcacagcgcgaacgccgagggattttaaatcccttgtgtctaccgattccaccatccgggctcgggaagaaagtggaggcgcgttccggagtcgaaccggactagacggatttgcaatccgctacataaccgctttgttaacgcgccaaattcttcaggcctttcagccagacatccgcttgacgccgatgtcttttaaactggagcgggaaacgagactcgaactcgcgaccccgaccttggcaaggtcgtgctctaccaactgagctattcccgcattcatcaagcaatcagttaatcacttgattttattatcgtctggcaatcagtgccgccgttcgatgcgttgcattctacttacctggcgcgatgagtcaacgatatttttcaccacttttgatcgtttgctgaaaattacgccgaaacgatcactgatcaagcaaatctgcacgcgcagcgctcaaatattgcaacatactccacagagtcagtaccgcagccacaaagaaaagtgcaataccggcgtactcaacccaaatgttcggacgccacagcagccatgccaacgccaccatctgggcagtggttttcactttcccaatccaggagacggccacgctactgcgtttacccaactccgccatccattcgcgtagcgcagaaataataatttcacgggcgatcatcgttgccgccggtaatgtcacccaccagctgtgataatgctcggttaccagcaccatggcgatagccacgagaactttatctgccacagggtcaaggaaagcaccaaaccgggtactctggttccagcggcgtgccagaaaaccatcgaaccagtcagtcaccgccgcgacgcagaaaatgagcgcggcggcaaacgggctccaggtgacaggcagataaaagaccaatacaaagaatgggataaggatgacacggaacagtgtaagcaacgtagggatattaaattgcataatgacgggtaactatctgttgtcagtaagattacccctatgttgctacagagacatcaatgtttcaagctccagaagatcttttctgccagaccttggctaatacccggcacttttgcaatttcctcgacgctggcgttacgtaaaccttgcaaaccgcccatatatttcaacaacatttgccgacgttttggcccgacgccttcaatggtttccagggaactggtatttttgaccttcgcccgttttttacggtgcccgccaatcgcgtgatcatgactttcatcgcgaatatgctggataacatgcagcgcgggactatctggcggcaaactaaatccctcaccttccggctcaaagaacagcgtttccagtccagccttacgatctgctcctttggcaacgccaagtagcagcggatgatttttatcccaactgacatccagttcggcgaagacatttttcgcctgcgcaagctggcctttgccgccgtcgataaggatcacatccgggatcttactgtcgtcaatggctttaccataacgccgacgcagcacctgattcatcgccgcataatcatcgcccggcgtgatgcctgtaatgttatagcgccgatactccgcacgcagcgggccgttagcatcaaacaccacacaggaagcgacggtttgttcgcccatggtatggctgatgtcaaagcactccatccgcttcacttccggcaatttcaacacgctggcaagcgcggtcagtcgctggtgaacggtagattgctggctaagtttgctggttaaggccgtcgccgcattggtgcgcgcgagtttcagataacgcgccctatcgccgcgaggtttggtttgaacattaatcttgcgtcccgccagttcactaagggaatcggcgagcagcgttttatcgctaagattaaaatcgagcaggatctcacccggtaaggtgcgcatctggctgccttgtaaatagaactggcctacgaaggtttctaccacctcgctcagttccgtaccgccaggcactttcgggaaatagctgcggctgccgagcactttgccctgacgaatgaacaatacgtggacacaagccatgcccgcatcgaacgccacaccaataacgtcgaggtcgtcgccggtattggaaacgaattgtttttcggtgacgcgtcgcaccgcctgaatttggtcgcgaatacgtgcagcttcttcaaactccagattctggctggcagtttccatacgactaatgagttgcgtaagcacctgatcatctttgccagacaaaaacaggcgcacatactcgacctgctgagcgtattcttcttcactcaccagtccttcaacgcacggtcccagacagcgccctatctggtattgcagacacggacggctgcgattgcgataaacactattttcgcactggcgaatggggaaaatcttttgcagtagcgccagtgtttcacgtacggcatagccattcgggaacgggccgaaatattcacctttggcatgcttcgcaccacgatgcatcgccagacgcgggtgggtatcaccactcaggaagataaaaggataacttttatcatcgcgtagcaaaacgttgtaacgcggctgatagagtttgatgtagttgtgttccagcaacagcgcttcggtttctgtgtgagtaaccgttacatcaatttgctggatctgggcgaccagcgcttcggttttgcggctagcgaggttgctacggaaatagctggaaagccgttttttcaggtctttcgctttgccgacatagataaccgtaccaccagcatcgtacatgcgataaacgcctggctggctggttacggtttttaaaaacgcttttgcgtcaaactgatcactcactgactacttaatgtctccgcattacacagaccatggcgaattgccaggtgagtcagctcaacatcgccatgaatgtttagtttactgaacatacgatagcggtagctgttcaccgttttcggactgagattgagctgttcactgatctcattgaccttctggcccttggtgatcatcagcataatctgcaattcacgttcagacaaactggcaaatgggctttctgttttttctggttcgatctggcttaacgccatttgttgagcgatgtcagaagcaatgtaacgctgcccactatagacagaacgaatcgcactcacgacttcctgcggagccgcgcctttgctgaggtagcccgcagcaccggcctgcatgactttcgctggtaaagggttttctgtatggacggtaagcatgatgattttgacatcagctgtggaacgcgcgattttacgcgtcgcctcaagaccgccaatgcccggcatactcatgtccattagcaccacgtcaacggcatttgtccggcaccacttaacggcgtcttcaccgcagcttgcctcaccgacgacttttataccctttatatcttccagaatgcgtcgtatccctgcgcgcaccagttcgtggtcatcaacaagtagaacgttgatcaaaggaatatctccagaaatagggataacgctactgatagttagtcattcgtatattagcggtttttattgcaactttgaaacgttaaaaatggtgggtattcgatttttctctcgtttttgtcaattcgattgtccacagttatggtcacgcccgtcaccaacggcttaccggatcgtttcacagtaagccctacgatgaaatgtgacaaaaattgactttattcagcaaaaatgaaaatcagcccgctgaatatgtaacattaattaacccgaacaatacgggcaaaaaacattcatgataaaaatatttattggtcattatattaacgtattttatagcactgccgatatcacgctcaaaaaacaaccactgctatttttagcaaagcttatggtatactccgccgccttaacatttttcaccgcaaattttcattgcaacatgacgaggaaaataaatgagtacgcctgatttttctactgccgagaataatcaagaactggcaaatgaagtctcctgcctgaaagcgatgctgacgctgatgctgcaggcgatgggacaagctgacgcgggccgcgtgatgttaaagatggaaaaacagcttgcgctgatcgaagacgaaacccaggctgcagtattttccaaaacggttaagcaaattaaacaagcctaccgtcagtaatataaaaccggctgatagcgtgcctttcagccggtttttgcatctggcacgcaggacagaaaagagatcaaattaagccagtagcggccgcgtaacaggcaacctgggtcttatttggtgcattaatttttttctgcatgtttttctggtggaaattgaccgtattctcagagatactcaaaatcatcgctatctctgcacttgttttcccttccgccgtccacctcagaatttctttttcgcgcttgctgaaattcatctctggcgtcatcactatttcatcatttaaacgcatcagagccatcagactttcgcgcaccagtaactgcatttttaattgcagttcatcactaagaatgggtatttcgcgcgcgctgcaacgggaaaaggacaaaaagcccagcgcccggtttggcagcattaaatactgagtgacaccgcggcgtaaaccatgtgcgcgcgcggcttcccataacggctgtgcttcgctgaataagtcatcattccacattaaatggccctgactaaagttttcagggttcagcaccggatcaattgcgagaaagttttttgcctgataataactaacccacgcctcagggtaattggtgtaaaaagccactttaggtcgagtgaatggtaccgggtggcggacacataagctatagtaatcgtactccagctgctgagcctgaagctcaatttcatggtagacctcttctgcggtctccatcctctgaaaacgcaacagcatcgtgcgacgccagctgaaaaaatccttatcctgcatagtaaaccgcaacgcccttgagagtgagtatcatttataatgataattcaaactatcacataaataagatttatatataatttatattattcaggcaatgaattacttttgcaagccatcgcattctcttatgttattaatgagttatgctgatttgttaagcagttttatcaggcttgaaatggcgtccagccccgacaggtgaatcgtcggggctgattttttcttattattgcagcagaaacttctcgaggaactggcgggtgcgaggctgctcggttccgtaacgtttatcatgttatcctaaggattatccgaaaaataatacctacgaacatcttccaggatactcctgcagcgaaatatttgttttaagctcactcacatatcgcaacatttactttactttaagacaattccaggcaaattatacaacactttacgggatagtaagtccgcctgaaaaatcgcgagagtggcgcattaggtgacccatgttgttccgtttagtcatgatgaaatattcaggtaaggggaattatcgttacgcattgagtgagggtatgccatgagtacgattattatggatttatgtagttacacccgactaggtttaaccgggtatctgttgagtagaggggttaaaaaaagagaaatcaacgacattgaaaccgttgatgaccttgccatagcttgtgatagtcagcgccctagtgtggtgtttattaatgaggactgtttcatccacgatgcttctaacagtcagcgtatcaagctcatcattaatcaacatcccaatacgttatttatcgtttttatggcaattgccaatgttcattttgatgaatatctattggtcagaaaaaatttattgatcagttctaaaagcattaaaccggaatctctcgacgatatccttggcgatattctgaaaaaagagacaacgataaccagctttttaaatatgccgacgttaagtttgagccgaaccgaaagcagtatgttgcgaatgtggatggcaggtcagggaaccattcaaatctctgaccaaatgaatatcaaagccaagaccgttagtagccataaaggtaatattaaacgtaagatcaaaacgcataataaacaggttatctaccatgtcgtccgactgacggataatgtgactaatggtatttttgtcaacatgcgctaacacattctgactggtggtttcccaccagtcaggctgaataagattactctgctttctccacaaagataccgtcctgatgccctgcttcattaaagaaccagatgccgagcgggtagtcttccaggctaaccaggtacattgtgccttcactaaactcctcaactgccagtaccacgccaggacgacgcggaccgccatccgttttgactgttacccgatcattcaccttcatcgttttcctcctgtggctttgtgccagtgtagaacaatttcgtttttctggcagcgccaggcgcgcgcgagtgctgattttctcgacggtctatacttaagagatgccaggcggacttaacgactggcggcaacaacagagtaacggttgcgaggaaagatgatgaaaaccgcaaaagagtacagcgataccgcaaaacgtgaggtcagcgtcgatgtcgatgccctgctggcggcgatcaatgaaattagcgaaagcgaagttcatcgcagccagaacgattctgaacacgttagcgtcgatggacgtgaatatcatacatggcgtgaattggcggatgccttcgaactggatattcatgacttcagcgtctctgaagtgaatcgttgaatgcacaataaaaaaatcccgaccctgagggggtcgggatgaaacttgcttaagcaagaagcacttaaaaaattcgttacaccaggaaatctgatgtgttcatcaccttatccgcaatttttttcgctgacaagaaaatattcgccatatgaatgattaacgctacttatgaatagaaatgtgacgcacgtcaccccttggtggctctggcgtcagcgggatcgctcccgaaaaaatcatctttgataatttgtgcggttttgagaatcatcctggtaagaggagtactgcgcgactatgtttagtattcaacaaccactactggtttttagcgatcttgatggcaccctgctggacagtcatagttatgactggcaaccggcagccccctggctcacccgtttacgcgaagcaaatgttcccgtcattctctgtagcagtaaaacaagtgcggaaatgctgtacttgcaaaaaacgttggggctacaaggtttaccgctgattgccgaaaatggcgcagtgatccagcttgctgagcaatggcaggagatagacggttttccacgcatcatcagtggtattagccatggcgaaatcagcctggttttaaatacgctacgcgagaaagaacattttaaattcacgacttttgatgatgtcgacgatgcaaccatcgccgaatggacgggattaagccgtagccaggcggcgctgacgcagcttcatgaggcgagcgtaacgctaatctggcgcgacagtgacgagcgtatggcacaatttaccgctcgtctgaacgaactgggcttacagtttatgcagggtgcgcgcttctggcacgtactggatgcttctgccggaaaagatcaggctgccaactggattatcgcgacctatcaacaattgagtggcaaacgcccaaccacacttggcctgggcgatgggccaaacgatgcgcccttactggaggtaatggattacgcggtgattgtgaaagggctaaatcgtgaaggggtgcatctgcatgatgaggatccggcccgcgtctggcgaacgcagcgtgaaggaccggaaggatggcgtgaagggctggaccattttttctccgcccgttaagcgttatcgctcgcgaatacccgattacgcccagcctgtttagcgagataaagccgacggtcggccagactctggagttgttcaaaatcataatcaccggtttcctcgctgctgcttacccccaggctggcactgatgcgtatcgtcgtactcttggcgatcaacatctctttttcatttaatttcagtcgaatacgttctgcgacctccgcagcctccgtcagactcgcgcctggcagaatcacacaaaactcctcaccaccgacccgcccggcaacgtcctgcgcacgcaaggaactgctaattaatccggcagcatgagaaagaacacggtcgcccgcctgatgaccaaagcggtcattaatcgctttaaaatggtcaagatcgacctgaatgacagaaaaaggatgttggtgcgtctgacacaatttagcgagcggacgggctttttcgaacagtgcgccacggttatataaacgcgttaaggtgtcgtgccacgcctgccactgcaagctgctttgcagaacatacatgttgctaaccatccggcgaatcacataccaggagatgagtaacatggtggtaaagagcgcccacagcagggttaatgcaatgctgatactgccgaaatcgccgcgcacgccttcgcttaacgtatggacacgcaccagcacaccgtcgaaatggtccagacgttcccagctaacatagcgactgtccatacgaatgccgccccgcgtgtcatgttccattgcctgcgccagcaaggccagttcacgaggatcaaaaatattccctgttggatggtcaggattggaagaggtcaaaaatctcagcttactgtcatagagctgatactcaccatcgaggtttttatcgatggcgtttcttaaaaattgctgcatagtacgcacgggaatactcatccccagcacgccataccagtagttattactgtctaccggaacactgacggtaacctgcggttcagtattgctggcgtgttccggttggctagtgaaccagcgtaccgcgcggtgacgattttctcgttgactatggccaataaaccagggttgggtgacatagccgtaataacgcgttggaacattgcgcgtaaacaaggtcggctgcgtgctaacgtaaaatccggcacggctgacatacatcgcctgttcaaccatgctgctggagttgtgcgctagtcgcagcaagtaaccaacttccagtgcagcggtaatttcattgtcgaggctttcattttcgcgagacaggagattcccctcgctgactaatgcatcgctcacaccattaactggcagagtgcgtcgtcggttgagttcgattttccaggcgtgctcgtcgcgatgctgttcgaactcggttacagcatcacgcagagaggtgaaatccagtggcgctacgagagcttcgcgcatgccattacgtaaaaagatcagtttgtcgacgttatactgcaaatgcttatcgagcgcgttggcaacgttttccagatgattacgctggctggagatataggcatcttccagcaccaccacttcacgccaggtgagcaaggtggaaaaaagcaataccacgataaagcagagattaacgacatgaccaggccccaggcggcgtgcgagttttttcaaccagctctggttttccatttttgtctcgtgctgcaccctgacgactcccaacctgcttttttatgattctggcataacctggcgatagcgtaccgcaaaacagcgataattttataatggtggcatgataagacgcgactatcattcattgcaggcattagcacaccaggccggatgtgatccggcctgatgttaatgataccctttcacacttcttccgcagaacgactcccctcccccggaacaagctcggtttcatgaaaagcttcccgcttgaccccgtaaccgtcataccaacgacactcaaccataccgctggagtatccagtgacaatcatccgcgggccgccctctttaaccgtaacttcctcactaaccataaagctcatactcgcctccttttttcgagtgaaacttgttcaccttagttgaagatggcgaattttgcataatagccagtgcgagtattaatgtgcctgaccgcgcattttctctacggctttcactcccagcaccacgatgccgccgatgataaatccaagaatcagatttaaaacagtcggtaatatcatcgccactactgcactttgctgcccggcgaaatgttcaatggcgtgatgcagcggcgcaattccatgtaccacaatcccaccgccgacgaggaacatcgccagcgtgccgacaatgcttaacgctttcatcagccagggcgcgataatcaataaccctttacctaatgcctgcatcagcgcgctggatttttccgccagccaataccccaggtcatcaatcttaacgataacccctaccagaccgtagacgcccacggtcactaccagcgcgatgccactaagcaccagcacctgattaagcaacggcgcttcggccacaatccccagcgtgatggcgacgatttccgcagacaatataaaatcggtacgaatcgccccttttattttgtccttttcaaacttcagcggatcctgcgccgccagcttctccagacgctgctggctctgcgccggatcttctttatgtttacgcgcctccagcatatgcagcactttctctactccttcaaagcagagaaacgcgccaccaatcatcaacagaggcgtaatcgcccacgggataaacgcactgatgatcagcgccagcggcaccagaatcactttattaatcaggcttcctttcgccacgccccagaccacgggaagttcccggttggcccgcacgccactaacttgttgcgcattgaggcttaagtcatcccctaatacaccggcggttttcttcgccgccagtttgcccatcacggagatatcgtccagtagtgtggcgatatcatcgagcaacgtcagtaaactactcccggccaaaagcattccctctcatttttattgttgaagggtgtaagtatgaagcaaaaacggcagctctgatacttgcttcacaggtcaacatttttttaacaatcaagtgcaattatatctctcgccagcagaatgattttcacgtttactatgaaccacctttttatttccaccgtgagggattatgcgtttccgccagttgttaccgctttttggcgcgctgtttgcgttgtatatcatttggggcagtacctattttgtcattcggattggcgtggaaagctggcctccgttaatgatggcgggcgttcgattcctggcagccggtattttattgctggcatttttgctactgcgcggacacaaactccccccgctacgtccgctgctcaatgccgcgctgattggcctgttattgctggctgtcggtaatggcatggtgacggttgccgaacatcaaaatgttccttccggcatcgccgccgtagtggttgcaaccgtgcccctctttaccctgtgcttcagccgcctgtttggcattaaaacgcgcaaactggaatgggtgggtattgccattgggcttgccggaatcatcatgctcaatagcggtggaaatttaagcggcaatccgtggggcgcgattctgattttaatcggcagcattagctgggcgtttggcagtgtttatggcagccgcattaccttacctgtagggatgatggcgggtgcgattgagatgctggcggcaggcgtggtgttaatgatcgcgagcatgattgcgggtgaaaaactgacggcgctcccttcccttagtggcttccttgcggtcggctatctggcgctgtttggtagcattatcgccatcaacgcttatatgtatttaatccgtaatgtcagtccggctctcgccaccagctacgcttacgttaacccggtggtcgcggtcttgctgggtacgggactgggtggagaaacactgagcaagattgaatggctggcgctcggcgtaattgtcttcgcggtggtactggtcacgttgggaaaatatctcttcccggcaaaacccgtagttgcgccagttattcaggacgcaagtagcgagtaatcaagcgagtaaatgaatcccctgcgtgtcgatctgcgcgctggcaccttcgccgcagatccactcttccagacgctcggtaagcgcttcatccgtcagcttctcgcgcccacgtaacgcgcactcccagacaatcaatacgcgccagccgagttcctgcaagcgactgatatcgcggcgatcgcgctcaacatttttacctatcttctccagccagaactcggttcgagtcgcaggcactttaaacagatagcagtgatgatgatgccagaagcagccatgggtaaatatcacgcagcgatattcatcaacgacaaaatccggacgtccgggcagactggcgtcctgaacgcgaaatgccaggccctgcccggttaacagactggcgaggcgcttctctatcgccgtatcacgcgtggcaatcgcgcgcatatttttgctgcgagtggccttatcgtgaacgtcggccatgttgtgcctcttgctgacgcttagttatcgactacgtcggccatgttgtgcctcttgctgacgcaacgccaccgcctgtttgatttttggctcaagcagttttgccaccgcggcaaagaccggcacgaccacgctgttaccgaactggcgataggcctgagtgtcgctaaccggaatacggaatttcgcttctcccggcgcttcaaaacccattaagcgcgcgcattcccgaggcgttaaccgacgtggacgatgttgctgattcagcggatcgtcaaagtctttctcacccgtggccatatcccagccgcgatcgattaaaatttccgcgccatctttgtaataacgcgcagacagcgtacgcgtgacgctttgcggattgttcggataaaccattccataaccgaagccgttaccgcgcgcctgatgttttttcgcatatcgatagaggtacttccacagcaccggcgtcaggatatatttcgcctcgaccatcgggtccaacagctgcgccagcgtcactcgctgcgcagggaaacattcgctgatatcacgcagggtaaaatcggctttcagattcagatcgcgacgaaaacccaccagcacgatgcgttcacggtgctgcggcagaaaatgtttgccgtcgatgattttcggatcgtctggcccattatcttctgcatcagccacgtcatagcccagttcgtccagcgtctgcatgatgatgcggaacgttttaccctggtcgtgacttttcaggtttttgacgttttcgagcacaaacatcgccggacgacgcgcgtcgataatgcgtaccacatcaaaaaacagcgtgccctgggtatcgcaggcaaaaccgtgcgcccgcccgaggctgttctttttgcttacgccagccaggctaaatggctgacaagggaaaccggccagtaaaacatcgtgttcaggaatgtgttgacgaatatgttccgccgccgcctcatcactcacgccttctttatggctgagggtgatgtcgcggatatcttcattaaaatgatgcgtcgccggatcgcaataatggttggctttataagtgcgtaccgcatgtttgttccattcgctggtaaacacgcactgtccgccaatgctttcaaaaccgcgacggatgccgccaattccggcgaatagatcgataaagcgaaacgcataatgcggatgatgtgccggtggtttgggtaataacgtttgcagatgggcgaactctttctcacttaaacggtgccatgcgctgtcattcgccagcgcacgttttaaaattgccgcgctccagtgattctcacctacaccattaagctgcgccaccaacgttttaacatcataaatttgcagcagtttctccagcattgcctgtgcggcattcccggtgctgtaactatcggttacacttatattttcctgcatagatttcaccggccatctgagatggccgacaggttaacataattacagccatttagggccacgcgctcagccagcggaactaaacgcatctatcaccttgtgatcgacaccttcattctcccccgccagttcggcactgagcttcgccataaactcgactaaaaaatgcgcgttgtgctgcgccagctgcttgcctcttgcggtttgcatggtttgcggtagcttcagcaacttagtctggaaatgatccagcgcgtagcgtttatcatcaagcgggcgatgctgtgcgaacggatcttcaccatcaaacagcgccacgcccaatgccccactaacggcaaacacgcgcgccaggccaatcgcccccagggcttccagccgatccgcatcctggacaattttagcttccgttgttaagggggcgatttgcgcgctgaaactgtgagcggcaatggcatgacaaacggcctcgattttctccgccggaaattgctcgaactcttcacggagcaggcgacgcgtctcttctgccgccaggatactagaacgctgcctttgcggatgatttttcgccaggctcacaatatcgtgaaaataacaggcggttaaaatcaccagcatatcgacatcgtcatctgccgccagcttctgtgccgtagcccagacgcggcgaaaatgacacacgtcatgggccgcgtcctggtgctgatgatggtttttcaaccagttttcgaactgtgcctgccagtgttgtaagtccatacgcgctccgttgccaaagagtcgccaccttagcagtttttattcatagcgtctgctacgtgcgggacgaggtcgggtgtaccaggcaatgctgcctaacaatgccccgaccagagccataaataaaaatccgaccagtgcccctaaccactttcccgcggtagagcctaaatcgctttcaaatccgctcacgggggcatcgggaatccggctcatcacccagatgtaacgcgccattgcccagacgaaatagccacaccatgtatagaaagcccacaaagccagtttgccgccagggctgcgagagagtctctcttccatctttgtgctaccgtattccattttgagataacccggaaaattcagacttagtactattatgtgataaaagtcacatttttccacattggatgagccagtcaagactcaatcattttttgaacaaatagataaattttgcgcaacggcagtgaatacaggaaaaatcgttttgagcgattttatttatctttgatatcggctttattaattcatttaatcaatatattagcactgattacaattatacctttttattattctgtgtcatgatgcttccgttattagccttttatcgtcttgtttatattttttgggccggcatgatgccggcttttttttatgccttcattaatgtgcgcctgatcacaccagccgtttggcgcaacaatcattgataccccctatgtttccgctcaactcataacatattgatatacatttataattttcatgaatatttatatttagaattcataattatgaattatattaaatagattagaaacattttgatatcttttaaatacatttgttacatgtaatccttaaaataaaatgaacttcatagaatagtatccaaatgtgcttttttttggataacggcacttattgatatattcatgaagattataatcacaagggaatacataatgaaaagaaaagttctggcaatgctggtcccggcgttattagttgctggcgcagcaaatgcggctgaagtctataataaagatggtaataaactggatttgtacggaaaagtagtgggtctgcactacttctctgatgattctggcagcgatggcgacatgtcatatgcccgtatcggtttcaaaggtgaaactcagatcgctgatcaattcactggttatggtcagtgggaatttaacattggcgcaaacggtcctgaaagcgacaagggtaataccgcaacgcgtctggcatttgcaggtttaggctttggtcagaatggtactttcgactatggtcgtaactacggtgtcgtatatgacgtagaagcatggaccgatatgctgccagaatttggtggcgatacctatgctggcgctgacaacttcatgaacggtcgtgctaatggtgttgcaacctaccgtaacaatggcttctttggttaggtcgatggcttgaactttgctttgcaatatcagggtaataatgaaagtggtggaccattcgggcaggaaggttccggtagtggtgatggccgtagcctttccaaagaaaatggtgatggtttcggtatgtcaacatcctacgacttcgacttcggtttaagtctgggtgctgcatatcaaactctgatcgttcagatcgtcaggttggagttggtttaaatgatcgtaaccatagcaacagaaatgctggtggtgaaaccgctgaagcatggactgttggtgcaaaatatgatgctaataatgtgtatttagcagctatgtacgctgaaactcgcaatatgaccccatatggtggtggcgagtttgataatggtgaatcaagatcagccatcgctaacaaaacccaaaactttgaagttgttgctcagtatcagttcgactttggcctgcgcccgtccatcgcttacctgcaatctaaaggtaaggatttaggcggttgggctcatgacggcaacggcgacccacgttacaccaataaagatctggttaaatacgttgatattggtgcgacctactacttcaacaaaaacatgtccacctatgttgattacaaaatcaacctgctggacaacgacgatgacttctacgaagcaaacggcatcgctaccgatgatatcgttgctgtgggcttagtctaccagttctaatcagtcaactcgctgcggcgtgttactgtaaaactgaacactagcctgagttcgtccctcatcgaactcaggcttttttattggcatttcatctccatctgcggcacacgcaattgccgaagcatatcgatacagcaccttaccctgcccctcctggcacaataacatcaaccagctactcttcaagctaacacccaaatgcatttctttatgaattaatccgtaacaaacacgcttcccatatagaaatatttgcaaaaatagtgcatgaaataagctttttctctaccaatccgggatataaatattcatcagcaccacaatattccacagcactaaatctctccccgccaccccgtacctctgataatggtctaaaatcattgaagccacttgcgacgacgttgctcaataaggaaaatttggcgtgaataatattcaacaccagtgcagcatcatcattacatacttacagccgccgactaccgctttcgatatattgactcaattttccagcctggttaaaaatagcgaccagctcagtcgcaaatatagtgactaccctaactaagcaacaataaggaatacactatgactgttcaaacaagtaaaaatccgcaggtcgatattgctgaagataatgcattcttccctagtgaatatagccttagccaatataccagtcctgtctctgatcttgatggcgtggactatccaaaaccttatcgcggtaaacataaaattctggtgatcgccgcggacgaacgttatttgccgaccgataacggaaaactgttcagcaccggtaaccatccgattgaaacgttgctgccgttgtatcatctccatgctgcaggtttcgaattcgaagtggcgaccatttccggtctgatgaccaagtttgaatactgggctatgccgcacaaagatgaaaaagtaatgccattctttgagcagcataaaagcttgttccgcaatccgaagaaactcgcggatgttgttgccagcctcaacgctgatagcgaatatgcagcaatctttgttcctggtggtcatggcgcacttattggtttacctgaaagccaggacgtggctgccgctttacagtgggcaatcaaaaatgaccgttttgttatctccctttgccacggcccggcggcttttctggcgcttcgccacggcgataacccactgaatggttattccatttgcgcattcccagacgccgcagacaaacaaacgccagagattggctatatgccgggtcatctcacctggtacttcggcgaagaactgaagaaaatgggcatgaatatcattaatgacgacatcaccgggcgagtacataaggaccgtaaacttctcaccggcgacagtccttttgcagcgaatgcgttgggtaaactggcggcgcaggaaatgctggcagcttacgcgggttaatccctgttacgtttgaatgtaagcgcataatcaatcgcggccgcgttagtactcacgacgtggctgcgttttttcacggttaatttatggcgtactgaagccctatgttaatttctttgcggtaacgtaatccggaacacattatgcttattgagatagtgatacgtagcacttcccccatgcaattcggcaatcgctttgactaaagaaaggcctagtccctgacctacggaatgacggctattatctccccgccaaaatctacggaagagtttttcaggctcattaattttcgttccagggctggcgatatcaatattaagatagctgttggtatcaagaaaactggttatatgaatacggcttttttctgggctatatctaatggcattaacaataagattgcttaacattcgttgtagtaaaattttatccgcaaagatttgctgattgcactcgaccttaaagcaaatctctttctcgtcactaaggtattcaagatagtccaacaaattttcgacttccttattgagagaaaggctgtccagtttcaccaaaacattgtttttatctgccctggcaagaaacagtatgttctctgttaaccggctaatattttccagctcttcaatgtttccggcaattgttttttgatattcagcgatacttctggtttgactgagcgtaacctgattctgacccagtaatgcattaattggcgttctaagttcatgagcgagatcgtcagcaaactgacttagacgctcaaaatctttgactaaagcatgatgcattttattcaacgcctgcccaagaggttttagttctctcggtaatgcgctaacctcaacaggctctcggctatcgttataattcagcgcttccgttacaccactcaactttttgatctctcgtaatcccgttctgattaacagcggacttaatacactgcaaagtacaatggcgacaatgcaaattataatgctattaattttatactgttcaagcatgttatgtctggcactagccaatttagccacagtaaccgttaaacttgggctaacttcatcaatattaattcgtaaagcatctatctctgtatcattaataatgcttctgtaaatgccagctgcgctgattgtctcactagcaggtatgttatttaacatgccatcactgacatttgtccggttaacaattttattgatgctatcaccatgaataatcaagatatcctgactaacatccatcatccggttaaagtacacaggtaacgtatctggatttaccccatcaattaacaactgcttgatctgcgctgtccggttaatgagtgttgtatcatcgcgccatttcaactcacttgccaggccattatagagagtccagacaattccggcgccagcaacagacagtagcaatataaaaagcaaggttaaacggacggttatagatagtcttttcattatttttttaccgctacgaaactatagcccatcccccggattgtggcaattagcttttcaggaaaaggatcatcaacttttgcgcggagcctgcgaatggcgacgtccaccgtattggtatcactatcaaagttgattccccaaatttcactcgcaataaccgttctgggtataatttcgccagctctggaggccagtagccaaagtaactgaaactccttgcgcgtcagtgtaatactgatattgtccctgctcacactatgactaacagagtccattcttaagccgctgatttctaatgtactattcaaagcgtgatgttgccttaattgtgcccgaacccttgccagcaactcagaaaaactaaaaggttttaccagataatcatttgccccactgtccagccctctgactctgtcatcgacagaatcccttgcagtaaggcaaataacaggggtttgctttgctgttcttaacgtttgtaagatctgccagccatccatacccggaagcataatatccagaatgatcaatgcataatcatccttcagcgcaagataaagcccatctctgccatcagaaacggcatcgatgacataacccgcttcggaaagcccctgcgttacccattcctgggtcctttgattatcttcaataagtagaatcttcatgaaaataatatgccataaatcatatgttatagaaacagcctggttcattacaaaattgtaatgctgctgtaaggttaccctggacgctttttcgctatcctcaaaactcattcacatgacaaggatataaacatgttaaagcgttatttagtactcagcgtagcaacggcagcatttagtttaccttctttggttaatgccgcacaacaaaacattcttagcgtgcacattttgaaccagcaaacaggaaaacccgctgctgacgtgacagtcactcttgaaaagaaggcggataacggctggttacaacttaataccgccaaaacagataaggatggacgaattaaggcactgtggcccgagcaaactgcaactacgggcgattaccgtgtcgtatttaaaaccggggactatttcaagaaacaaaatcttgaaagtttcttccctgagatccccgttgaatttcatattaataaagtgaacgagcattatcatgtgcctttattacttagccaatatgggtatagtacctatcgtggcagttaatgcataaatatgtaaaagcagatctctgctactgttagggaggacactccctgacagattaacagtaaacggctcttgctggctaacgacaaaaaagtgtgatggcttatgaaaaagaatcaatttttaaaagaaagtgatgttacggccgagagcgtattctttatgaagcgtcggcaggtgttaaaagcactgggcatcagtgcaactgcactttctttgcctcacgctgcgcatgccgatctgcttagctggtttaaagggaacgatcgcccgcccgcccccgccggaaaagcgctggagttcagcaagcctgccgcctggcaaaataacctgccactgacgccagcagataaagtttccggttataataacttctatgaattcgggctggataaagccgatcccgccgctaatgctggtagcctgaaaaccgatccatggacactgaaaatcagcggcgaagtggcaaaaccattgaccctcgatcatgatgacttaacccgtcgcttcccgctggaagagcgtatttatcgtatgcgctgcgtggaagcgtggagcatggtggtgccgtggattggttttccgctgcacaaattgctggcgcttgccgaacctaccagcaatgcgaagtatgtcgctttcgaaacaatttatgcaccggaacagatgccaggccagcaggaccgctttatcggcggtgggctgaaatatccttatgtcgaaggattgcgtctcgacgaagcaatgcatccgctcacactgatgaccgtaggtgtttatggcaaggcgttaccgccacaaaatggcgcgccggtgcgactgattgtgccgtggaaatatggctttaaagggattaaaagcatagtcagtattaagctgacccgcgagcgtccgccaaccacctggaatctggcagcgcctgacgaatacggtttttacgccaacgttaatccgtatgttgatcacccgcgctggagtcaggctaccgaacgatttattggtagtggcggcatcctcgatgtacagcgccagccaacgctactgtttaatggttacgccgcccaggtggcaagcctgtatcgtggcctggatttgcgggagaatttctaaatgcgtctgacagcaaaacaggtgacatggctgaaagtttgcctgcatcttgccggattgttgccgtttctctggctggtctgggcgatcaatcacggtggactgggtgccgatccggtgaaagatattcagcattttactggtcgcactgcactgaaatttttgctggcgaccttgttaatcacccctctggcacgctacgcaaaacagccgttattgatacgcactcgccgcctgttaggattatggtgctttgcctgggcgacactgcatttaacaagttacgcattgctggagctgggcgtgaataatctggcgttattaggtaaggagttaattacccggccttatttaacgttaggtattatcagctgggtaattttgcttgctttagcgttcactagtacccaggcgatgcagcgaaaactcggcaagcactggcaacagttgcataatttcgtctatcttgtcgcgattctggccccaatacattatctgtggtccgtgaagattattagtccgcagccgctcatctacgctgggctggctgtactgcttttagccttacggtataagaagttgcgttccctttttaaccggttacgcaagcaggttcacaacaaattatctgtataacttcatattgccgacaaagtacgcgttatccctgccggatgtggcgcgagcgccctatccggcatacacagatcgcatcaggttatgtttcgtttgtcatcaacctcaaatcaccaaaataatttattttatttcaataagatagataagtagaactgagaaagccatgctctcgtttcctaagagttgttgcattttgctatatgttacaatataacattacacatcatatacattaactctggaggaaactgttttggcgattcgtctttacaaactggctgttgctttaggtgtctttattgttagcgctcctgcctttagccatggtcatcacagtcacggcaaacccttaacagaggtcgaacaaaaagctgctaatggtgtttttgatgatgccaatgtacaaaaccgaacgctcagtgactgggatggagtctggcaatccgtttatcctttactgcaaagtggcaaacttgaccccgtctttcagaagaaagcggatgcagataaaactaaaacatttgctgaaattaaagattattatcacaaaggttatgcaacagatatcgagatgattggcattgaggacggcattgttgaattccatagaaataatgaaacaacaagctgtaaatatgattacgatggatacaaaatactcacctataaaagtggcaagaaaggcgttcgttacttattcgaatgtaaagatcctgaaagcaaagcccctaaatatatacaatttagcgatcatataattgcaccacgaaaaagttctcattttcacatttttatgggtaatgatagtcagcaatctttattaaatgaaatggaaaactggccaacgtattatccatatcagttgagtagcgaagaagtggtcgaggaaatgatgtctcattgagtattctcatgataacgcctcgatgccgctttagtaagttatcataactgccactggtccatccacaaacgccactgaacgcaagctagctacagacacgctcatcactatgacgtgtctgtatattaataagctaacccgcattgagttaaccaataacggattccatacacaatacggccaacagagaaagatacctgtgctcacgccattgcttatattggctggttacaatatgcactatcaattttttaaataacaaattattaaaaccacatctgtataaggaatttttaaggttcgtgggatagcttgactgtgaaaatcacaggagctacaaaaatgaaccgattcagtaaaactcaaatttatttacattggataacgctgcttttcgttgcaataacctatgccgcgatggaactccgtggctggtttcctaaaggtagtagtacttatctgctgatgcgagaaacacattacaatgcgggtatattcgtttgggtgttaatgtttagtcgcctgattataaaacaccgttatagtgatccttctattgtgccaccgccacctgcctggcaaatgaaagcggctagcctaatgcacatcatgctttatataaccttccttgcacttcctctgctggggattgctttgatggcttacagtggaaaaagctggagtttccttggtttcaatgtgtctccctttgttaccccaaacagcgaaattaaagcactgataaaaaatattcacgaaacctgggcaaatataggctactttttaatcgcagctcacgctggcgcagcactctttcatcactacattcagaaagataatactctgttacgaatgatgcctcgccgcaaataagtcgatccccttacaaggaaatgtgaaccatggacatcaacgcgtcataaatgtttacgcaagtgcacaatgcaccctttccactatcaacaaggaggagcagaaactgtgtaaatcgtacaatggtaagacttatcaaaaatacaggttaattttggtatttaaaccttttttacttgttagtatgatacaaaggctttcaaaaaagctgcgaaattcaacaactcttggaaattatggactttgtcccgcggctttaatctgacggccgcgttccttttttgactcaattattgaacccttctctacgcaacttcagttcccaccaccaactttgcggcagtttcataggatgaatgtctaaaagaataatggtgagcgataagaaaacgactgaataactgcacattttcgctcgaaagcttcctgtcagatccatagcgaatcaagtgctgaatgtcacagtatcgaacagaaaacagtgacgatctaacccttcaagaatattctacgattgttctgtttaggaaaagcaaggcgggaagtcgggagataagtcattgataaagtggcggagagagggggatttgaacccccggtagagttgcccctactccggttttcgagaccggtccgttcagccgctccggcatctctccgttcagatggttgccatgatgccaggaaatttggcattttaacagtccctgtccgtgcaattttgttcaagtgacgagtttgcgagcaaaacgatgattaagtggccctggaaagtacaagaaagtgcacatcaaactgcccttccctggcaggaagcactaagcatcccccttttaacgtgtctgacggaacaggaacaaagcaaattagtcactcttgccgaacgttttttacagcaaaagcggcttgttcctttacagggctttgaactggatagtttaagaagctgccggatagcacttctattttgcctacccgttctggagttaggactggaatggctggatggttttcatgaagtcttaatttatcctgcgccatttgtggtcgatgatgaatgggaagacgatatcggtctggtgcataaccaacgtattgttcagagtggtcagagctggcagcaagggcctatcgttttgaactggttggatatacaagattcttttgatgcttctggttttaacctgattattcatgaagtcgctcataagctggacacccgtaacggcgatcgcgccagcggagttccctttattccgttgcgtgaggttgctggctgggaacacgatcttcatgctgcaatgaacaacattcaggaagaaatcgaattggttggcgagaatgcggcgagcattgatgcttatgcagccagcgatcctgctgaatgttttgccgtactttctgaatatttctttagcgccccagaactttttgctcctcgtttccctagtttgtggcaacgtttctgccaattttatcaacaagatcctttgcagagactgcatcacgctaatgatacagacagctttagcgcgacgaatgttcattaattaacaactttgcagattaattaaccaattgaaatgacttatgaaatttagtgttgacagacaaggtaccgctaagtaatattcgccccgttcacacgattcctctgtagttcagtcggtagaacggcggactgttaatccgtatgtcactggttcgagtccagtcagaggagccaaattctaaaaattcgcttttttagcgcaatgtcactgaccttagttgaacattgttttttaacggatagcgggtttttaacatcttaagcgccctcgacctttatggttgagggcgttttgctatgaacgccatcaccattttcccctcgattataaaacttgagttattcagtagtctcccctcttgcaactcacacccaaaactgcctaacgaaaagttattaattttcaatcatattgctatcagtatttacattttttcgctgtgctagaaagggcgcatttatgttagctcgtagtgggaaggtaagcatggctacgaagaagagaagtggagaagaaataaatgaccgacaaatattatgcgggatgggaattaaactacgccgcttaactgcgggtatctgtctgataactcaacttgcgttccctatggctgcggcagcacaaggtgtggtaaacgccgcaacccaacaaccagttcctgcacaaattgccattgcaaatgccaatacggtgccctacacccttggagcgttggaaagcgcccaaagcgttgccgaacgtttcggtattagcgtggctgagttacgcaaactcaaccagtttcgtacgtttgctcgaggttttgataatgtccgccagggtgatgaactggatgtcccggcacaagttagtgaaaaaaaattaaccccgccgccgggtaatagcagtgacaacctcgagcaacagatagccagtactagtcagcaaatcgggtctctgctcgccgaagatatgaacagcgagcaagcggcaaatatggcgcgtggatgggcctcttctcaggctagtggcgcaatgacagactggttaagccgcttcggtaccgcaagaatcacgctgggcgtggatgaagattttagcctgaagaactcccagttcgattttctccatccgtggtatgaaacgcctgataatctctttttcagtcagcatactctccatcgtactgacgagcgtacgcagattaacaacggcttaggttggcgtcatttcactcccacatggatgagcggcatcaacttctttttcgaccacgatcttagccgttaccactcccgcgccggcattggcgcggagtactggcgcgactatctaaaattaagcagtaacggctatttgcgactgaccaactggcgcagcgcacctgaactggacaacgattatgaagcacgcccggccaatggctgggatgtacgcgcagaaagctggctacccgcctggccgcaccttggcggtaaactggtctatgaacagtattatggcgatgaagtggccctgttcgataaagacgatcggcaaagtaatcctcatgccataaccgctggacttaactatacccccttcccgctgatgaccttcagcgcggagcaacgccagggtaaacagggcgaaaatgacacccgttttgccgtcgattttacctggcaacctggcagcgcaatgcagaaacagcttgacccgaatgaagtcgctgcacggcgtagccttgcaggcagccgttatgatctggtggatcgcaacaacaatatcgttctggaatatcgcaaaaaagaactggttcgcctgaccctgacagaccccgtgacagggaagagtggagaagtgaaaagtctggttagcagcctacaaaccaaatatgccctgaaaggctataacgtcgaagccaccgcactggaagctgccggtggcaaagtggtcacaacgggtaaagatattctggttaccctgccggcttaccggttcaccagtacgccagaaaccgataacacctggccgattgaagtcaccgccgaagatgtcaaaggcaatttgagcaatcgtgaacagagcatggtggtcgttcaggcacctacgctaagccagaaagattccagcgtaagcttaagtacccaaacattgaacgcggattcccatagtaccgccacactgacttttattgcgcatgatgcagcaggtaatcctgttgtcgggctggtgctcagcacgcgtcacgaaggtgttcaggacatcaccctttctgactggaaagataatggtgacggaagctatacccagatcctgaccacaggagcgatgtctggcacgctgacgctgatgccacagctgaatggtgtggatgcggctaaagcccccgccgtggtgaatatcatttctgttagcagttcccgaactcacagcagtattaagattgataaggaccgttatctctccggcaatcctatcgaggtgacggtagaactgagagatgaaaatgacaaacctgttaaggaacaaaaacagcaactgaataacgcagtcagcatcgacaacgtgaaaccaggagtcactacagactggaaagaaaccgcagatggcgtctataaggcgacctataccgcctataccaaaggcagtggacttactgcgaagctattaatgcaaaactggaatgaagatttgcataccgctggatttatcatcgacgccaacccgcagagtgcgaaaattgcgacattatctgccagcaataatggtgtgctcgccaatgagaatgcagcaaacaccgtcagcgtcaatgtcgctgatgaaggaagcaacccaatcaatgatcataccgtcacgtttgcggtattaagcggaagcgcaacttccttcaacaatcaaaacaccgcaaaaacggatgttaatggtctggcgacttttgatctgaaaagtagtaagcaggaagacaacacggttgaagtcacccttgaaaatggcgtgaaacaaacgttaatcgtcagttttgtcggcgacagcagtactgcgcaggttgatctgcagaagagcaaaaatgaagtggttgctgacggcaatgacagcgtcacaatgaccgcgaccgtccgggatgcaaaaggcaacctgctcaatgacgtcatggtcactttcaatgttaatagtgcagaggcgaaactgagccaaaccgaagtgaatagccacgacgggatcgccacagctacgctgaccagtttgaaaaatggtgattatagggttacggcctctgtgagctctggttcccaggctaatcaacaggtgaattttatcggtgatcaaagtactgctgccctgaccctcagtgtgcctagtggtgatatcaccgtcaccaacacagctccgcaatatatgactgcaaccttgcaggataaaaatggcaacccactaaaagataaagaaatcaccttctctgtgccaaacgacgtcgcaagtaagttcagcattagcaacggaggaaaaggcatgacggatagtaacggggttgcaatcgcctccctgaccggcacgttagcgggcacgcatatgatcatggctcgtctggctaacagcaatgtcagcgatgcacagccaatgacgtttgtggcggataaagacagagcggttgtcgttttgcaaacaagcaaagcggaaatcattgggaatggcgtggatgagacaactctgacagcaacagtgaaagatccgagcaatcatccggtggcggggataacggtaaacttcaccatgccacaggacgttgcggcaaactttacccttgaaaataacggtattgccatcactcaggccaatggggaagcgcatgtcacgctgaaaggtaaaaaagcgggcacgcatacggttaccgcaacgctgggtaataacaataccagtgatagccagccggtaacatttgtggcggacaaagccagcgctcaggttgtcctgcagataagtaaagatgagatcacaggtaatggcgtcgatagcgcaacgctaactgcaacggttaaagatcagttcgacaatgaggtgaataatcttccggtaacattcagcagtgcctctagtggactcaccctgaccccgggagtaagtaataccaacgagtctggcatcgcgcaggccactctcgcaggcgttgcctttggtgagaagacggttactgcaagtctggctaataatggtgccagcgacaacaaaactgtgcattttattggcgacacagcggcggcaaaaattatcgagttggcgcctgtcccagacagcataatcgccggtaccccgcagaacagctccggcagcgtcatcaccgccacagtcgttgataataatggctttccggtgaaaggtgtgactgtgaacttcaccagcaacgcagcgacagccgaaatgacgaacggcggtcaagccgtgacgaacgaacagggtaaggctaccgtcacttataccaatacccgctccagcatagaaagtggagcgagaccggataccgttgaggccagtctggaaaatggtagctccacgcttagcacaagtattaatgtcaacgctgatgcgtctacggcacatctcaccttgctacaggcactttttgatacagtctccgcaggcgagacaaccagtctgtatattgaggtgaaggataattacggcaacggtgtcccccagcaggaggtaaccctcagcgttagtccaagtgaaggcgtgacccccagtaataacgctatatatactaccaaccacgacggcaatttttacgcaagctttaccgctacaaaagccggggtttatcaattgacggcaaccctcgaaaatggcgatagcatgcaacaaacagtgacctatgtgccgaacgtcgcgaatgctgaaatcacgctggcagccagcaaggatccggtgattgccgacaataacgatctcacgacactaacagcaacagtcgctgatacagagggcaatgcgatagccaacactgaggtaacatttactctgccggaagatgtgaaggcgaacttcacgctgagcgatggcggtaaagtgattactgatgctgaaggcaaagcgaaagtcacgctgaaaggtacaaaagcaggcgctcatactgttacagcaagcatgactggcggtaagagtgagcagttggtggtgaactttattgcggatacgctcactgcgcaggttaatcttaacgttaccgaggacaattttatcgctaataacgtcgggatgaccaggctgcaggcaacagtgactgatggaaacggcaacccgttagccaatgaggcggtgacattcacgctaccggcagatgtgagcgcaagctttactctcggacaaggcggttccgccattactgatatcaacggcaaggctgaagttacactgagcggtacaaaatccggcacctaccccgtgacagttagcgtgaacaattatggtgtcagtgatacgaaacaggtgactttgattgccgatgctggtaccgcaaaactagcctccttaacctctgtatacagtttcgtcgtcagcacgaccgagggcgcaaccatgacggcaagcgtcactgacgctaacggcaacccggtagaaggcataaaagttaatttccgcggaacctccgtcacgctaagcagcaccagcgttgaaacggatgatcggggtttcgctgaaattcttgtgacaagcaccgaggtcggactgaaaacagttagtgcctctctggcagataaacctactgaagtcatcagccgattactgaatgccagtgcagatgttaattctgcgacgattaccagtctggagataccggaaggtcaggtaatggtcgcacaagacgtagcagttaaagctcacgttaacgaccagtttggcaacccggttgcgcatcaacccgtgacattcagtgcagagccatccagccaaatgatcatcagccagaatacggtctctactaatacgcagggtgtagccgaggtcaccatgacgcccgaaagaaacggtagctatatggtgaaagcatccctgccgaatggagccagtcttgagaaacaactggaggctattgatgaaaaactgacactcacggcgtccagtccgcttatcggtgtctatgcccctacaggcgctactctgacggcaacgctaacctctgcaaatggcactccagtggagggtcaggtcatcaactttagcgtaacgccagaaggggcgacgttaagtggcggaaaagtgagaactaactctagtggtcaggctccagtcgttttgaccagcaataaagtcggtacatatacggtgactgcatctttccataacggcgtaacaatacagacacagacaaccgtgaaagtcactggcaacagtagcaccgcccatgttgctagctttatcgctgatccaagcactatcgccgccaccaacactgatttaagtaccttaaaggcaacggttgaggatggcagtggtaacctgatcgaaggtctcactgtgtacttcgccttaaaaagcggctctgccacattaacgagtttaacagcggtgaccgatcaaaacggaatcgcgacaacaagcgtgaaaggagcgatgacaggtagcgtcacggtaagcgcagtcacgaccgctggtggaatgcaaacagtagatataacgctggtggctggcccggcagacaccagccagtccgtccttaagagcaatcggagtagtctgaaaggggactataccgatagtgctgaattacgtcttgttctgcacgatataagtggcaatccgatcaaagtttctgaagggatggaatttgtgcaaagtggtactaacgtgccctatataaaaattagcgcaattgattacagtctaaatatcaacggtgattacaaagccactgttacaggaggcggagagggtatcgcaacgctgatccctgtattgaatggtgttcatcaagctggtctgagtaccacaatacaattcactcgcgcagaagacaaaataatgagcggtacagtaagtgtcaatggtactgacctaccgacaactacattccctagccaggggttcaccggggcgtattatcagttgaataatgacaactttgccccaggaaaaacggcggctgattatgagtttagtagctctgcctcctgggtcgatgttgatgctaccggtaaagtgacatttaaaaatgtcggcagcaatagcgaaaggattacggcgacgccaaaaagtggaggccctagctatgtatacgaaatccgtgtgaagagttggtgggtgaacgccggcgaggctttcatgatatacagccttgctgaaaatttttgcagcagcaatggctacacgctccccagagcaaactatttaaaccactgtagttcccgaggcatcgggagtctgtacagtgaatggggagatatggggcattacacgactgacgctggttttcaaagtaatatgtattggagttctagtcccgcaaacagtagcgaacaatacgtagtttccctggcaacaggtgatcaaagcgtatttgaaaagcttgggtttgcttatgcgacatgttataaaaacctgtgattttccgttataatttcttaaagagtgttccattcggggcactcttttttacattccctctacagaactagcccttctctcacagaaaatgaataaataaaaatgcggcaccgccagaatcgcgttcgatgtgactatgatcattttcggtgagtactgctttgatctaaaggctggttttctgtgatgattgaccagcctcagagtattgatgacaccaccgttcataacagatcggcattactatgcataagtactgtctcatattctcgccaaaacactttttaatgcctttgcgaattcatccagacttatattgtcaattttttgcccaacgacgactgactccgagacatcggccattgcgggccatcgcgttttgtaatcagcataaattgcaacaacaggggtattataggcacttgccatatgtaatattgaggtgtcaggagttattgcgatataagcatcttttatgattgctgctgaacgtttaatcgagggtggtaaggataaacggtagacattattataacaatccactaatgccctggctttatcttcacctttgggtccatgaacgatcactattggtatatctgtttcactttaaatttttgctattagattttctgcaatcgataatgaaaatgtacgttcctgcgagctaccttctaaattgaacgcaatgtaagatcctaacgatcgcatttcctcgcgcacctcatcgagtacatcctcacttagtggcaattcatatattggcctgactgctggaaaacccgcctcacgcatcataaatgcccatgtcataggtacgggagcccggagtttctgatccatactggacgcgttcttgcacaaaggggagaagcaattcatggttataccaacaacctgaaaattcgtttttgctttcaactgactgataaataacatcgttttcaggttctttttacgcatcccctcaatgcaaagatccggcgtaccgtattgctgtgttatgttctttgctaaatcttttatttcttttaatgttgcgtgatcctgcatagtcattgtgactaatgttaatttagtctgttcaagtttaagcgcattaaagacttctaaattaattgtcgacgttacaattaaaagatgcttaattttatgcaattcaagcgcccgaataacaggaaagatggccatagcatcgccaatctgatcgggaatatggatgacaacaaagtctgttttttcaatattgaaattataagctttataatcgtagtaactaaatgcaatacgtctcaacaatgatgctaaaaacatacctaacctcgcctccctactggttataatgcaatgcagtctatcagactcatcagggtgccattttgtgcatatgcggacttttatgtttcatatctctaacctgtgggtcctctgcttaatccttaaacaacaccagcaactcctgcgctttcatcttccatcgaatttttcatgttgccgctaatcagccataaaatcatttgcagatgcgctctgtcgaggtagtctcataaggttcgtttatagatcgacggcaatgtgagttaccttttccatactaattataaaaagacagtacaaacaggatcattatggactccacgctcatctccactcgtcccgatgaagggacgcttagcttaagtcgcgcccgacgagctgcgttaggcagcttcgctggtgccgtcgtcgactggtatgattttttactctatggcatcaccgccgcactggtgtttaatcgcgagtttttcccgcaagtaagcccggcgatgggaacgctcgccgcatttgctacctttggcgtcggatttcttttccgtccgctcggcggtgtcattttcggtcactttggcgaccgactgggacgtaagcgcatgttaatgctgaccgtctggatgatgggcatcgcgacagccttgattggtattcttcctagtttcagcaccattgggtggtgggcacctattttgctggtgacactgcgtgccattcagggatttgcagtcggcggcgaatggggaggcgcggcgttgctttccgttgaaagtgcaccgaaaaataaaaaagccttttacagtagcggtgtacaagttggctacggtgtaggtttactgcttagtaccggactggttagtttgatcagtatgatgacgactgacgaacagtttttaagctggggctggcgcattcctttcctgtttagcatcgtactggtactgggagcattgtgggtgcgcaatggcatggaggagtccgcggaatttgaacaacagcaacattatcaagctgccgcgaaaaaacgcatcccggttatcgaagcgctgttacgacatcccggtgctttcctgaagattattgcgctacgactgtgcgaattgctgacgatgtacatcgttactgcctttgcacttaattatagtacccagaatatggggctaccgcgcgaacttttccttaatattggtttgctggtaggtggattaagctgcctgacaattccctgttttgcctggcttgccgatcgttttggtcgccgtagggtttatatcacaggtacgttaatcggaacgttgagcgcatttcctttctttatggcgcttgaagcacaatctattttctggatagttttcttctccataatgctggcaaacattgcgcatgacatggtggtgtgtgtgcaacaaccgatgtttaccgaaatgtttggtgccagttatcgctatagtggcgctggagtcggttatcaggttgccagtgtggttggcggtggatttacaccttttattgccgctgcactcatcacttactttgccgggaactggcatagcgtcgccatttatttgctggctggatgcctgatttccgcaatgaccgctttgttgatgaaagacagtcaacgcgcttgatagcctggcgaagatcatccgatcttcgccttacacttttgtttcacatttctgtgacatactatcggatgtgcggtaattgtatggaacaggagacacacatgaataataagggctccggtctgaccccagctcaggcactggataaactcgacgcgctgtatgagcaatctgtagtcgcattacgcaacgccattggcaactatattacaagtggcgaattacctgatgaaaacgcccgcaaacaaggtctttttgtctatccaagtctgaccgtaacctgggacggtagcacaaccaatccccccaaaacgcgcgcatttggtcgctttacccacgcaggcagctacaccaccacgattactcgccctactctctttcgtagctatcttaatgaacaacttacgttgctgtatcaggattatggtgcgcatatcagtgtgcaacccagccagcatgaaatcccttatccttatgtcatcgatggctctgaattgacacttgatcgcagtatgagcgctgggttaactcgctacttcccgacaacagaactggcgcaaattggcgatgaaactgcagacggcatttatcatccaactgaattctccccgctaagccattttgatgcgcgccgcgtcgatttttccctcgcacggttgcgccattataccggtacgccagttgaacattttcagccgttcgtcttgtttaccaactacacacgttatgtggatgaattcgttcgttggggatgcagccagatcctcgatcctgatagtccctacattgccctttcttgtgctggcgggaactggatcaccgccgaaaccgaagcgccagaagaagccatttccgaccttgcatggaaaaaacatcagatgccagcatggcatttaattaccgccgatggtcagggtattactctggtgaatattggcgtgggaccgagtaatgctaaaaccatctgcgatcatctggcagtgctacgcccggatgtctggttgatgattggtcactgtggcggattacgtgaaagtcaggccattggcgattatgtacttgcacacgcttatttacgcgatgaccacgttcttgatgcggttctgccgcccgatattcctattccgagcattgctgaagtgcaacgtgcgctttatgacgccaccaagctggtgagcggcaggcccggtgaggaagtcaaacagcggctacgtactggtactgtggtaaccacagatgacaggaactgggaattacgttacagtgcttctgcacttcgttttaacttaagccgggccgtagcaattgatatggaaagtgcaaccattgccgcgcaaggatatcgtttccgcgtgccatacgggacactactgtgtgttagtgataaaccgttgcatggcgagattaaacttcccggccaggctaaccgtttttatgaaggcgctatttccgaacatctgcaaattggcattcgggcgatcgatttgctgcgcgcagaaggcgaccgactgcatagccgtaaattacgaacctttaatgagccgccgttccgataataagttctgaaccttcttatcagaaatagatgtgaaggagtaagtaagacacctggcaaatagcctgcaataatcgtgggctgtttgcttccttgggcggatacgagttttattatcgtcttaatgatttccacatattaaaagcaagtatgctttcaaaacacaattataaaaaatcccgccaacaatataagtttttataaaattaaatataagattatggctttagaatatttttatttctaatagacgagatttttcctgttatgatataatatgctgaattaacacatgttaacgatttaccagtaatgtaaataaattttcgaggagatcattccagtgggacgtaaatgggccaatattgttgctaaaaaaacggctaaagacggtgcaacgtctaaaatttatgcaaaattcggtgtagaaatctatgctgctgctaaacaaggtgaacccgatccagaattaaacacatctttaaaattcgttattgaacgtgcaaagcaggcacaagttccaaagcacgttattgataaagcaattgataaagccaaaggcggcggagatgaaacgttcgtgcagggacgttatgaaggctttggtcctaatggcagtatgattatcgccgagacattgactagtaatgttaaccgtacgattgctaacgttcgcacaattttcaataaaaaaggcggcaatatcggagcggcaggttctgtcagctatatgtttgacaatacgggtgtgattgtatttaaagggacagaccctgaccatatttttgaaattttacttgaagctgaagttgatgttcgtgatgtgactgaagaagaaggtaacattgttatttatactgaacctactgaccttcataaaggaatcgcggctctaaaagcagctggaatcactgagttcagtacaacagaattagaaatgattgctcaatctgaagttgagctttccccagaagatttagaaatctttgaagggcttgttgatgcccttgaagatgacgacgatgtacaaaaagtttatcataacgtcgcaaatctctaattatcttttaaagaaatctgtctttacggcagatttctttaatctcatataattcttataaaaaatataatattcaactcgtcatattgattatacccccccgttcccagagaaataatatttattaaaattccagttcttctttttctgattacagaaggcaaagtggcaattacgcatagtttcccgataaagacgcgatagcgacatcccgcataaggcatttttctctttatctttgtacggtacttcatggaacagagtttttgaccttgcgaatcgtgatgtctgttggggagggacaatttgctcactgaagcgtgagactcgattaagcgcacgaaacacagaaatcaaaaaacccggtcacttttttacaaggtaaccgggtaaaaataatttttattttttaactgttttgagactcatagagatgtctcaaaactaaaatttggctcctctgactggactcgaaccagtgacatacggattaacagtccgccgttctaccgactgaactacagaggaatcgtgagaacgaggcgaatattagcgatgcccacccacaatgtcaaagcctgttttttaaatttgaaatcgtttgctgaaataatctgcattttgtcgtttattcgctcacaactggctttttttcacacttttgcggctcgggtcgagggtatttccatagccaacgtccagtaaccattcgccagtaaaacagcacggcccgcacagcccagtcggcaaacattcccatccagacaccaaccacaccccagccaagcatgattcccagcacataaccgactacaacccgacaaccccacatgctcaacatgctaacccacatggcgtaacgggcatcacgagcacctttaaatccagcgggtagcacccaactggcggaccaaataggcataaataaagcatttagccaaatcagaatcacaacgacatgtttaacctgtggatcctgggtgtaaaagcttgccataaccccggcaaagggagccgttagccaggcgatggccgttaatccaagagtggaaagccagaacacatgccgcaactgaatctctgcttgcgctatctgccctacccccaaccttcggcctgtaatgatcgtagaagcagagccgagcgcacttccgggtaagttgataagagccgcaatactaaacgcgataaaatttccggcaataacactggtccccatcccggcaacgaacatttgggttaataaccgaccactggtaaataacacactttcgacactcgcgggaataccaatccccatgacttcccagataatgctaaaattcagcggtttaaaatagctctttaagctaatccttagcgcaggattaaaaccaatcgccagcacccacaaaattgcaactgcgccaatataacgagaaatggttaaacccagccctgccccgacaaatcccagtcccggccaggagaaaaggccgtaaatcaatatgccgctaataataatattaagaatattcaggctaccgttaatcaatagcggtattttcgtattccctgcaccacgaagtgccccgctaccaataagagtgatggcagctgctggataactgagtaccgtcagctccagataagtcaacgccagtgctttaacttctgtcgtggcatcacccgcgacgaaatcaataatttgttcgccaaaatgatgaataagcgttgccaacagtacggcaaacaacgtcatgatcaccaaactctgccgcgtcgccaccctcgctcgtcgtcgatcccgcttaccgagactaaatgccacaacgacagtagtaccaagatcgatagcagcaaaaaaagccataatgaccatattgaagctgtccgccaatcccacgccggccatcgcatcttttcccagccagctgaccagaaaagtgctcagaacccccatcaacaggacacaggcattctccatgaagataggaacagcaagcggggttatctcgcgccagaacaacactttgtagctcttgcgtttagcgtgccagcgagtgccgtgaacaacctggcgtaaagcagaggagatattcaaagcgctccttaattgcagaaagtgaaaccacatttcaaataaactgggagaatcagcaaagctgcaaagattttcgccaacaaattgtctgcaaatgcaacaaactgtacttagaaacggcaaacagttggggaatttaaaaatcgggttactcaaaagatttttcgccgttaagatgtgcctcaacaacgattcctctgtagttcagtcggtagaacggcggactgttaatccgtatgtcactggttcgagtccagtcagaggagccaaattcctgaaaagcccgcttttatagcgggatttttgttatatctgataatcaatttcctcttcactgctttccatcacctgccgcttgatatcctcaacactcagtcctgcattacaaagttccagaaagcgccagacatagttacgctgaagttgtcctcgcttcagtcccaaccagacagtattagcatcaaaaagatgccgcgtatccaggcggattaaattctcttcctcttgttcgccactggattgctcggcaactaatccgatcccaagcccaagagcaacataggttttaatgacatcagaatcctgcgcacttaatacaatatctgccagcaaacctttgcgggcaaatgcgtcatcaatacgactgcgccccgtaatcccctgtcggtaagtgattaacggccacttcgctatactttccagcgtcaatggactaatttgcgtcaagggatgatcgtgtggaacaagcaaactatggtgccaacgaaaccacgggaaggcgacgagctgcgggtcattactcaaacgctcgctggcgataccaatatcagcttcgccattttgcaacaatgtcgcaatttcctgtggcgtcccctggattagctcgagccgaacctccgggaaaagttcgcgaaaagctttaatgacctctggcaagctataacgtgcctgagtatgcgtcgttgcaatagtgagaacgccagacgtatcgttggtaaacaggtctgcaagccgacgaacattactggcttcattcagaatacgttctgcaatgaccagtaatgctttgcccggttcagtcatgcccagcagtcgcttacctcgtcgaacaaatatttcgatgccaagttcatcctccagttcccgaatatgacggctgacgccactctgactggtaaaaagcatattcgcaacctctgtcaggttgtaatcctgacgtgcagcctcgcggattatctttagttgttggaaattcacggtaaactccgggcagttcagatttcccgttattgttaaagtctaatgcccggcataacaaataataaaaacccgcatcttattccatcccgatataacacttagctcaccaattgccactgccttttttccatcactggagaactaatcacactcattaacaactctttcactgcctgtgcctgtgggcttaagttcgctctggcgggtaaatttaaactcaaagagagactcatggaaggagtggtaatgcgactcatccacccatttactgcgccacataagctacgcgcggcgctttcgggtaatactgcaacgcccatgccgctggcaatcgctgcggtaagcgtggcaatagactcaatttcaccaataacttttgccgtgagtcgccgtagggaaaaagcctcatcaacacgaagtctaatagcactgtaatcactggggagaaagaggttcatttgcgcaatagcattcacatcaacgctttgccccgggcaatcttgagttcctaccagaaaaagatcttctttcagcaaagcctgactggatacaccagccacaggggaatgctcataaatcaccgccatatcgagttggtgatttatcaatttttcgttaagcactgcaccactattttcatgaagatagataacgatctccggaaattcagcgcgaaccgcctgtaataagggcatggtgatggaactcgcagcggttcctggtgcaaagccaatgctgacttgcccgcttaatgcctgaccaacgttatgcaccgccagttgggcctgttcacactgacgtaaaatggcccgcgcatgggtatagagaatttttccggcgtctgttggtgtaacgccccgctttgtacggatcaaaagttgttgatttaactcaccttccagtgtggcaacctgctggctgagcgctggttgtgcgatatgcaatacttcagcagcctgggtcaggctaccaatatctacaatttttacgaagtatttcaggcgtctgaagttcatgttgcctccggtttttaagaatcggcccaagtgccgccattacttacaaccagattgcaagatgcttgccagttttattttggtgttgatgtacaagctaaccaactgtcaaataagagattatgatagattcgtcatttgctcctttaatcagctgtcgcgttcccctgccctataaaaggagggtatgcaccacgatggttcattacccaataagattgaaagctcaccactttgttgaaattgacagcaaacaaacaaaaaaatgcatttcaccctttgacatcaccatgcactgccattaatatgcgccccgttcacacgattcctctgtagttcagtcggtagaacggcggactgttaatccgtatgtcactggttcgagtccagtcagaggagccaaattcaaaaaagcctgctttctagcaggctttttgctttctaattaccaacgctcttaaaacatctgtctactaccagaactaatttgcacaggcattccgcttcgacgttgcaacgcagcatttgcgcgatttacatcaacttcttgcccgttgataaacgcccgcaaagatggggttaccggcaatggcacttttcggtcagactcatattctgcacgattgcggctcaatggctcatgaacttccagccagttgctgccatctggttcagtggtgtattttactggctggtcgataatttgcacacgcgtcccaacaggaacattatcaaacagatatttgatatcgtcattgcgcagacgaatacagccctgacttacccggagcccaataccaaaattggcattggtaccatggatggcatacaacctgccaatataaatcgcgtacagccccatgggattatcggggcccgcaggaacaaatgcgggcaaactctcccctcgtttcgcatattcgcgccgagtgttcggcgttggcgtccaggttggagcttcttgtttacgttcaacggtagtcacccagttacgcggggtttctcgcccagcctggccgataccaataggaaagacttccacagtattactgtctggtgggtagtaataaagacgcatctcagcgacgttaacaacaatccctttacgaacagtgtcgggcaaaatcagttgctgcggaatggtgagttggctgccagacttcggcaaaaaaacatcagcgcccgggttcgcttccagcatgttacttaacccttgcccgtattgtgcggcaaaagtctccagcggctgggtattgtgatcaggaacagttacagtaaagctctgccccactaaacggctaccctctggaggtaatggataagttaccgccaggctagtatggctggcaaaaagcagagcaaaactgcaaagaatatttacacgacgcatcatgtccctttcctatgtcgcgaaagctatccgttaagtatagcttttatcagacttttcgtttttaactgttcaaatcagaagtcgtattccccggtagaacaatattactggcagcaagttcgcccatgttgttgtatatcgcacaggcagcttcgatgatgggcatcgccagagctgcgccactcccctcacctaaacgcatctccatattgagataaggctccagccccaaatggctgagcgctatacgcgcgcctttttctgcgctcaggtgagaaggaatgagatacggtttgatcgcaggagacatctggcaggctgcgagcgcagcagcataagaaagaaatccatccagcaacacgggtaaaccgcaggaagcagcacctaacatcactccagctattccgaccaaatcaaatccacccacttttgccaggacatcaacaccatcctgaggatttggttgattcaacgtaatcgcccgacgcacaacatcaattttattagccagtttatctgtcggcaggtttgcgccaatcccaaccacttcttcaggatcccggccagtgattgtgctgactattgctgctgccggtgtcgtgtttgccatccccagttcacctacaccaaacagcgtgacaccgttttttgccagctcctgcgtataacatatgacgtccaaaagcaacttttcagcctgacggcgactcattgccggagcactagcaatattgccgctacctcgtgcgacacgcatgttgataagcccggggataggctcagcagtatcaataccaacatcaattacgtggacgttagcgcccgcttgttctgccagcacacacacgccggttgttccacgggtcatattttcagcctgtatggctgtcacttcttttggagaaatagcgaccccttcctcccagacgccgtgatcggcacacataaccagtaccgcttttttgcccacatgcggtatgccattcaaccccggcattcctgccagttgtatggcaagcacctccagctttcccaggctaccaacaggtttgagtaacccgtcaatatgccgttgtgcacggctcatagcggtagaatcgatggctgggatcgtattcagtaaatcggcaagtatttgcatctcacgtctctttatagcagtgccagcaggaagaccagttcaccaagctctatggctgctcccagcgtatcgcccgtttgcccgcccagcgtacgtttgagaagctgaccgaggatgaaaatcgccaccatcgtcaccaccatagcagccacaccatgcatacccggcaataatacggcagcaaaaatagcggctaagccgagtgtgacgcaggtttgtcgcccatcaattttgccaatgaacacattgccaagcccttcttcccgcgcataacgatgacgatacatcaataatgcggcagtcccgcggctgaccgcacatgctgccgccaggcttgcaaggatgctttcgccacgcagagccaactcgcttaacaccagaatctttgccagtaccacaaaaatcaatgccagaccgccgtgggtgcctaaacggctatcacgcatgatttccaacatgcgatcgcggctacgtgcagaaaatacgccatcacaggtatcagcgaggccgtccagatggaatcccccggtcatcagcaccagcacaagtacgctaaacagtgccgccagtggtgcgccacaccatgcctgcagcaccatgaagaccagcccgctaatcgcgccaagcaataatccaatcaaaggaaaagtaataataccgcgagaataatgctcgaaatccagtccctgggaccagcgacgcggtacaggcagacgcgtaataaaactgagcatcgcccaaaataatttactcatttgatttttactccaataccgctaaccaccagccatacttcatttgccgcagcggccaactgctgatttacccgcccggcaatatcacgaaaatgtcgtgccagacgactctccggcacaatccccattcccacttcgttagtcactaatacaacctttgcggggcaacgttggcaggcagcaatcaagctctgaatctcagcattaatcgcctgttccatcgcctgataatcccattcatcagggtctttatcgccgccataatcaaacaacagattagtcaccattgtggtaacgcattcaagcaacacaacctcattcgggttaatgtctgcatgaattaattcatcaagatgttgccagcgctccactgtgcgccagtgctccgggcggccttgccgatgatgttctatccgtgcagccatctcatcatcaaggatttggctggtagcgatatacagaacctgactagagtccccaataagcgcctctgcgtggcgactcttcccgctccgtgcgccccccgtcaccaaaatcatcataccgactcctgattcaaatgtatgatggtattcattgaacagaacaatggatcccccaccgttgctgaccgcaaaacatttacgcgattaatactgcgcgtaatataattaaaaatccagcattctcaatccattacgaaataagatggcattacggaatagccagactttctcgtgttaacgtccgacaaaatgcgtcattgacagcggtttctgtggattgacacatttcattcagataatgaattaatgctactgccggaacaaccagcaaacgggcattgtgttctgaaatccaggctattgattcaacgtcagcgacagatctgcgctgtaaaagaacttgtaaaacaacgtaatagaattatccggaatggtggcgactatgcactagggaaggtgcgaataagtggggaaattcttctcggctgactcagtcatttcatttcttcatgtttgagccgattttttctcccgtaaatgccttgaatcagcctatttagaccgtttcttcgccatttaaggcgttatccccagtttgcagaaactccgtaatgagattaaaagcgctcataactcatctgtcggccagaaggcgcgcctctgaattatccgacggacaaaccgggaacagtgtaatttcccggcaggagcgaaaaaattgaaaggcgcatcttactcttttcgctttcaaaaaaaagagtggtcatcgcgttaacacaccgccctgagatgaattagtgatgttttggctgcaccgcaacatacatttcgatatcccagtacccatcttccgcgccattgttcaaataaacctcgaagcagggctttggtaacatttcataagcactgtcctgcaagagactattaaagaactgataccagggtttagcaaaatcatcaccgactacacgagctaccgccaccgcatactgaccacctgtaatttctgtcagaatgacgccctcactgttttcgggaagcgtaaagtaacccggcaccgtcacgacggtgtcgcagcgtaatttttcggcgggtgtttcatctggattgtcgtaatagacagcaacccactccttcggcacaatatttttgctatctacccacatcatcaactgctcaaagcctttctttaccgtctgttcccacgggccaacgagatggaaacctgcaacggtacgtttctcttcctgcttaatctcgtagttcatgacgcctccattgatactgtttttatatacagtatagttgcaaaattaaaaccacaaggaatgagtgttgattatgcgagcagactcgcactcctgccagtctgctgcaaaagaaaggtcaggccttatggtggaaataatcactcaggcgagaaaacatgctgccttccccgacagattccagggtaaccagcggccagtgcgccacctgtttatcacggtcgtaaagttcaatttcccctacccgctgatgggcgctaattggcgcggtgagttctttaccatcaagggtatatttggctttgatatgtggaatttcggctttcggtagcaccatccagaactcttgttccgttcccaggtcgatattttctttatcgccataccagatgcgttccgttccgacctttttcccacggtgcaaaatttgcaccgtagtaaagttttgttgcccccaacgcagtaattttcttgcctcttcctcacgaccttttgcactgtcagcccccattaccactgcaatgagacgacgctgcccatctacagcgctagcaatgagattaaacccggcaccagaagtatgacccgttttcaggccgtcaacattcatggttttatcccacaacaacccgttacggttttgctgggtgataccgttccaggtgagacttttctcactgtacatatgataaaactcgggctcgccgtggatgatagcacgagaaagcacagctaaatcataagcgctgctatgctggccaggtgcatccagaccatgcactgtttcaaaatgcgtatccttgagatgcagcttctcggcatagttgttcatcatttcaacaaactgccgttgcccaccggcaatatagtcagccagagcaacacaagcgtcatttccggaatccacaattaaaccacggcttaaatcacgtacgcttacgcgatcgccctctttcaaaaacatcagactagaaccgacaaacaccggattatctttcgcccacgcatcgcgccccacggtgacaatatcgtctggcgtaatgcgatgactatcgatagcgcgatccacgacataacccgtcatcagctttgtcaggctggcgggattgcgctgttgatgctcattacccgcggtgaggatctgaccggtggtgtaatccatcaatacccaggacccggcatgaatctctggaggctgaggactaaaaggaatgttttccgccgcaaaaccagagcttaagttaaaaacgaacaaagaagcagcaataataagacggcgtttcaacagcaaaccctcaggagtttcaaatagctgttctttttacggaaatacttatgaactggctggaataaagtgcaagaaaatgtgactaccctctcatttttatctgacatgatctgttgccactcgctgccaaattgtggcgctaaagctgattagcacggtgatatttgatactctggcagacagcagaaataacggatttaacctaatgatgaatgacggtaagcaacaatctacctttttgtttcacgattacgaaacctttggcacgcaccccgcgttagatcgccctgcacagttcgcagccattcgcaccgatagcgaattcaatgtcatcggcgaacccgaagtcttttactgcaagcccgctgatgactatttaccccagccaggagccgtattaattaccggtattaccccgcaggaagcacgggcgaaaggagaaaacgaagccgcgtttgccgcccgtattcacagcctttttaccgtaccgaagacctgtattctgggctacaacaatgtgcgtttcgacgacgaagtcacacgcaacattttttatcgtaatttctacgatccttacgcctggagctggcagcatgataacagccgctgggatttactggatgttatgcgtgcctgttatgccctgcgcccggaaggaataaactggcctgaaaatgatgacggtctaccgagctttcgccttgagcatttaaccaaagcgaatggtattgaacatagcaacgcccacgatgcgatggctgatgtgtacgccactattgcgatggcaaagctggtaaaaacgcgtcagccacgcctgtttgattatctctttacccatcgtaataaacacaaactgatggcgttgattgatgttccgcagatgaaacccctggtgcacgtttccggaatgtttggagcatggcgcggcaataccagctgggtggcaccgctggcgtggcatcctgaaaatcgcaatgccgtaattatggtggatttggcaggagacattagcccattactggaactggatagcgacacattgcgcgagcgtttatataccgcaaaaaccgatcttggcgataacgccgccgttccggttaagctggtgcatatcaataaatgtccggtgctggcccaggcgaatacgctacgcccggaagatgccgaccgactgggaattaatcgtcagcattgcctcgataacctgaaaattctgcgtgaaaatccgcaagtgcgcgaaaaagtggtggcgatattcgcggaagccgaaccgtttacgcctagtgataacgtggatgcacagctttataacggctttttcagtgacgcagatcgtgcagcaatgaaaattgtgctggaaaccgagccgcgtaatttaccggcactggatatcacttttgttgataaacggattgaaaagctgttgttcaattatcgggcacgcaacttcccggggacgctggattatgccgagcagcaacgctggctggagcaccgtcgccaggtcttcacgccagagtttttgcagggttatgctgatgaattgcagatgctggtacaacaatatgccgatgacaaagagaaagtggcgctgttaaaagcactttggcagtacgcggaagagattgtctaatttgaagcctccgccgctggtacggcggaggacaatgttgagtcaggctttttgaacggtgatgctccacgctgcatcgccaatctgctgataatcggtgatggcatgtccttcttctgccgcccactgtgggattgcttcagttgcctgggtgcaatcaaactcaatcactaactcatcgccgctgaccatttctgccagagctgcttttgcttctatgagtggaaacggacagacctgcgtcaccacatccagctttttaatcaccatctttacaccttacttaatttgccgcagcagttgccagtcgcgccttacgctgcggtcgaacatacacaagccaggacgcagtccagactccgagaatcataaatacaaggccaatccagccctgccaggtcatcattgcagtcataaccagtccattaccgatagagcaaccacctgcaatactggcaccgaagcccatcagtacaccacctaacccgctacgtaatgttgtttgtgcatcagctgcgcgaacgcggaactcacggctcgctttggctgcaataaaactccccacgaagatccctaacaccaggaaaacgccccagttaatgtatttcatgtcacccgcgaccagaaattgcagaatattggccgttggggaagtgattcctaacccaaacatgcgtccggttgcttcactcaggggccaggctaaaagcgcaatcaaaccgatgagtacagctgtgacaaagggatgccagcgtttttcaaacagaatatgagcgatcccggttcggcgcggcggtaaggtcgcgactttgagttttggcttcttcaactctttcatcaccacccagagcgttatcaccagcaaaacggcaaccaacggccacacagacaaattaaaagtctcagcaatagagttatgttcagtactgtagtgctgcaaggtttgatttaaaccactggcatgtggagaacgcatcaccgcactcatcaccatataagtgaaaagcgcgatccaactgccgatcaatccctcacccgcgcgataccaggtcccggtggcacatccacccgccagaacaattcccagcccgaagatatacccacctataacagtaccaagccacgggaacgccccggcttcgtaagtcagtaggcccgcctgaattaacgcaaaaacccccacgctttgtacgctaattgcaatcagcaaggcgtaaaacatgcgattatttttcacgatatacatatcgcgaaaaccacctgtcaggcaaaaacgcccacgctgcatgacaaatcccagcagagcaccacaaattagcccgcttaatatcatactaaacataaattaattaaccagatgaatgttaatgaggaaattattcatgactggtggaatgcagaccaataaccaaattctctaaattagaacaaatggttattaatgaggagttcgatacaaaagaataaaaaaaccggagccaaatgttcattcgactccggtttattattagaaaagatgattatgctacgtcttcgtactgcggaaccggattacggaagctcttggtgacgcaagccaggtaaatcagaccgatagcagcccagatcagacccagaaccatactgctttcttccaggttaacccacagcgcaccaacggtcagcgcaccacacatcggcaggaacagatactggaagtgatctttcagcgtcttgttacgcttctcacggatccagaactggctgatgacgctcaggttaacgaaagtgaacgccaccagcgcaccaaagttaatcagcgccgttgccattaccaggtcgaagttgattgccagcagggcaatcgcgccaaccaggatgatgttcatcgccggagtacgccatttcgggtgtacataaccgaagaagcttttcgggaatacgccgtcacgacccattacgtacatcagacgcgctacgcctgcatgcgccgccataccggacgccagtacggtaatggtggagaagatcagcgcgccaacctggaacgctttacccgcaacgtacagcatgatttcaggctgactcgcatccggatctttaaagcgagagatatccgggaagtacagctgcaggaagtaagttgcaaagatgaagatcatgccgccgatcagcgcggtcaggaaaatcgcacgcgggatcacgcgctctgcatctttggtttcttcgctcaggttgctgatgccgtcaaagccggtaaaggagaagcacaggattgtcgccccggtaatcatcgggataacatgcgcatcgccagaccagaatggacgagtgctcgccagcgtaccagcgccttcaccttcaaatacgccataaacaaccatgcccagaatcaccgcgatcagcactacctgcaacacgacgattacagtgttgaagttcgctacggatttcagactacgcaggttaaaggcggtcataaaggccaccagcgccaccacaaacatccagcttgggatggaaggcaccagagcttcaaaatagattttcgccagtagaatgttgatcatcggcgcgaacagatagtcgagcagagaagaccaacccaccataaagccgacagtcgggctaatggatttctgggcgtaagtgtatgcagagccagcagaaggatagcggcgaaccagcttcccgtagctcagagccgtaaacaggatcgcaatcaatgcgaacgcataggctgtcggcacatgaccatccgtgaggccactaacgataccaaaagtatcaaacagcgtcatcggctgcatataggcaagacccatcattacaaccggaactaacgtaagcgttttacgcaattccacgcgagaggtgtttggagtaacgttatggctcatggtcattctcctttacggtgataaccgtcgcgtaagcaaaaaattgccccatttttttggattcctcagcgacaacaactgtcgatttttagtaaatatctatccggtacgaagcccggcctcttggtatgaatgattggtttgaagcaaaaaataaccgacgctgatgaaacgtcggtttttagtcattttttgacagcggcgcattgtgcctaaatgggggggaaatgacaagagaatgagaggcttgtcagaataatttttctttaaatggcactttttccgtcatcagattttgcataaacaccggcgatcgcactatttgctaaaatttcatcccgccaccagccactggcaagtcctgcggtctgttcgttccagccaatccagacgggttcaaagagagtttgggcgaccactttcttctcgattaacgcgccactatcgagaaaacgttgcgccagataacggggtaaatagccgcagccgaggccgctaatttgcagctccagtttggttttaaaatcgaaaacggtaatggcttcttgttcgtcgagaagttgacttgccgtagaagcgcctgcctgcgcagtatcccccaccacaatcgcccgatatcgcttaataatacgacgatttaacggctcttcttccagggctaacggatgatgaggcgcgaccgcaaagacttgttccagatcgcccaaccgactaaaaccaaactcactggaagatggtggctcatgcatcgcgccaacaataatatccgctcgcccctgagtcagggcatcccaactaccaccgagtacgccattgataaacttcaggcgcgtcacgctatgatgttgataaaaagcttcaatgagtggcgcaagcagagaaaaaggaaacgtgtcgtccacgccaatcaccagctcgttttcccagccttcatgcagtttgatcgcctgcttttccagttcccgcacggtatgcagaacttcccgccctttctctaataacatttttccggtgcgggtgaatttagcgcggtgtccgctacgatcaagcaattgaatattaaggtcgctttccagcttgtgaacggtgtaactcagagcggacggcgtcttgtagagtttggcgctcgccgccgcaaaactgccttctttttctaaggcatcgaggatcatcaacacatccagcagtggtttcatacacgcccccttgcagtgcatgcggcgtcctgctggcgtgatcgtttactccagcggcattaccagcggatcgggatactggtattcaaatcccagttcattacaaatccgactgccatcaataatcttacctttgccgctgtccagactatttctgaactgcggaggttccagccccagtaaacgggccatctgcggatagaaaacattacgcgcagggtgagctggcgcacatatattatagatgtgtccgcctttaggtgcctgtaacaacagagtgatagcgccaataacatcttctaaatggactaaattaacaccatgttcaccatcaggcgcggtttttccggcaaagaagcgtccgggatgacgtcccggtccgaccaggcccgcaagacgcagaatatcgacgctagtaccgggtaaattgtgcagccagtcttcgagttcttctaatactcgtccactgttggttactggattacgcggggtggtttctttcaccgtgccttgcgcgtcgccatagacagatgtactgctggtaaaaataatgcggggaatacgatgggccagcgcgctatccactaactcttgtaccgcttgtaaatagaactcatcgccggggccgctacgacgtgccggaagcgtaatgaccagcgcatcggcatccatcagggcatccagatcgtcagaatcgcaaactagctcaggctccatgcgaagcagatagctatcaatgccactcattcgggccgcttcgacaccatcttgtgtggttttactcccggtgacttgccagcctcgcgcactaagactcatcgccagcggcatgcctaaccaccctaacccgacaattgcgacctttttcatccgttatctcctgatacaccttagatctataaggctacgctagcgtatcaaaactgacaattcattctatgaatgaatctgttcaataatgataacgacatgctgcaatgagcagactatcgtcggtaaccgcgtataccagacggtgctcctctgtaatgcgtcgggaccagaaaccactcaaattatgtttcaggggttctggcttccccttaccttcaaatggcgttctgcgggtatctttgataagttcattgatctttttaacaattcgcttatctgtttcctgccagtacagataatcgtcccaactttcctcagaccagattagtttcactcaatgatgtccttttccgttcctttgccacttttcaggctatcgatactgtccatcaatctccgggcgttagcgggggagcgcagtagataagccgtctcttccaggctgttgtattcttcgagactcatcagaacacaagcctctccattctgacgagtaataaggatcggggcatgatcttcaacggctttcatcattgttgcgctcaaattctgacgcgcttcgctgtagctaattgtacgcatgtcaatctcctcttttgtacagttcattgtacaatgatgagcgttaattaactatttattaattagtttgtagatcaaggtattgtcagtgagacgaaaatccaggcttcgctatttttggtgccatcagctaagaggacagtcctcttagccccctcctttccccgctcattcattaaacaaatccattgccataaaatatataaaaaagcccttgctttctaacgtgaaagtggtttaggttaaaagacatcagttgaataaacattcacagagacttttatgacacgcgttcaatttaaacaccaccatcatcaccatcatcctgactaatctttcaggcgatgtgtgctggaagacattcagatcttccagtggtgcatgaacgcatgagaaagcccccggaagatcaccttccgggggcttttttattgcgcggttgataacggttcagacaggtttaaagaggaataacaaaatgacagacaacactcgtttacgcatagctatgcagaaatccggccgtttaagtgatgacagtcgcgaattgctggcgcgctgtggcattaaaattaatcttcacacccagcgcctgatcgcgatggcagaaaacatgccgattgatattctgcgcgtgcgtgacgacgacattcccggtctggtaatggatggcgtggtagaccttgggattatcggcgaaaacgtgctggaagaagagctgcttaaccgccgcgcccagggtgaagatccacgctactttaccctgcgtcgtctggatttcggcggctgtcgtcttagcctggcaacgccggttgatgaagcctgggacggtccgctctccttaaacggtaaacgtatcgccacctcttatcctcacctgctcaagcgttatctcgaccagaaaggcatctcttttaaatcctgcttactgaacggttctgttgaagtcgccccgcgtgccggactggcggatgcgatttgcgatctggtttccaccggtgccacgctggaagctaacggcctgcgcgaagtcgaagttatctatcgcagcaaagcctgcctgattcaacgcgatggcgaaatggaagaatccaaacagcaactgatcgacaaactgctgacccgtattcagggtgtgatccaggcgcgcgaaagtaaatacatcatgatgcacgcaccgaccgaacgtctggatgaagtcatcgccctgctgccaggtgccgaacgcccaactattctgccgctggcgggtgaccaacagcgcgtagcgatgcacatggtcagcagcgaaaccctgttctgggaaaccatggaaaaactgaaagcgctgggtgccagtagtattctggtcctgccgattgagaagatgatggagtgatcgccatgagctttaacacaatcattgactggaatagctgtactgcggagcaacaacgccagctgttaatgcgcccggcgatttccgcctctgaaagcattacccgcactgttaacgatattctcgataacgtgaaagcacgcggcgatgaggccctgcgggaatacagcgcgaagtttgataaaaccacggttaccgcgctgaaggtgtctgcagaggagatcgccgccgccagcgaacgcctgagcgacgagctaaaacaggcgatggcggtggcagtaaagaatattgaaaccttccacactgcgcaaaaactgccgccggtagatgtagaaacgcagccaggcgtgcgttgccagcaggtcacgcgtccggtagctagtgttgggttgtatattcctggcggctccgccccgctcttcagtacggtattaatgctggcgactccggcgagtattgcgggctgtaaaaaagtggtgctgtgcagtccgccgccgattgccgatgagatcctttatgcggcgcagctgtgcggtgtgcaggacgtgtttaacgtcggcggcgcacaggccattgccgcactggcgtttggtacggaatctgtgccaaaagtggacaaaatcttcgggccgggtaacgcctttgtcaccgaagcgaaacgtcaggtgagccagcgtctggacggtgcggcgatcgatatgcccgcaggcccgagcgaagtgctggtgattgctgacagcggcgctacgccggatttcgtggcttctgatttgctctctcaggctgaacacggcccggacagtcaggtgattttactgacgcccgctgctgatatggcgcgtcgcgttgccgaggccgtcgaacgccaactggcagaactgccgcgtgccgaaaccgcccgccaggcactgaacgccagccgcctgatcgtgactaaagatttagcgcagtgcgtggagatctccaaccagtacggcccggagcacctgatcattcagacccgcaacgcccgtgaactggtcgatagcatcaccagcgccggtagcgtatttcttggtgactggagtccggaaagcgcaggtgattacgcctccggcaccaaccacgttctaccgacttacggttacaccgccacctgttccagcctcgggctggcagatttccagaagcgcatgaccgtacaggaactgagcaaagaggggttctccgcgctggctagtaccatagaaacactggccgccgccgagcgcctgaccgcccacaaaaatgccgttactttgcgtgttaacgcccttaaggagcaagcatgagcaccgtgactattaccgatttagcgcgtgaaaacgtccgcaacctgacgccgtatcagagcgcgcgtcgtctgggcggtaacggcgatgtctggctgaacgccaacgaataccccactgccgtggagtttcagcttactcagcaaacgctcaaccgctacccggaatgccagccgaaagcggtgattgaaaattacgcgcaatatgcaggcgtaaaaccggagcaggtgctggtcagccgtggcgcggacgaaggtattgaactgctgattcgcgctttttgcgaaccgggtaaagacgccatcctctactgcccgccaacgtacggcatgtacagcgtcagcgccgaaacgattggcgtcgagtgccgcacagtgccgacgctggacaactggcaactggacttacagggcatttccgacaagctggacggcgtaaaagtggtttatgtttgcagccccaataacccgaccgggcaactgatcaatccgcaggattttcgcaccctgctggagttaacccgcggtaaggcgattgtggttgccgatgaagcctatatcgagttttgcccgcaggcaagcctggctggctggctggcggaatatccgcacctggctattttacgcacactgagcaaagcttttgctctggcggggcttcgttgcggatttacgctggcaaacgaagaagtcatcaacctgctgatgaaagtgatcgccccctacccgctcagcacgccggttgccgacattgcggcccaggcgttaagcccacagggaatcgtcgccatgcgcgaacgggtagcgcaaattattgcagaacgcgaatacctgattgccgcactgaaagagatcccctgcgtagagcaggttttcgactctgaaaccaactacattctggcgcgctttaaagcctccagtgcggtgtttaaatctttgtgggatcagggcattatcttacgtgatcagaataaacaaccctctttaagcggctgcctgcgaattaccgtcggaacccgtgaagaaagccagcgcgtcattgacgccttacgtgcggagcaagtttgatgagtcagaagtatctttttatcgatcgcgatggaaccctgattagcgaaccgccgagtgattttcaggtggaccgttttgataaactcgcctttgaaccgggcgtgatcccggaactgctgaagctgcaaaaagcgggctacaagctggtgatgatcactaatcaggatggtcttggaacacaaagtttcccacaggcggatttcgatggcccgcacaacctgatgatgcagatcttcaccagccaaggcgtacagtttgatgaagtgctgatttgtccgcacctgcccgccgatgagtgcgactgccgtaagccgaaagtaaaactggtggaacgttatctggctgagcaagcgatggatcgcgctaacagttatgtgattggcgatcgcgcgaccgacattcaactggcggaaaacatgggcattactggtttacgctacgaccgcgaaaccctgaactggccaatgattggcgagcaactcaccagacgtgaccgttacgctcacgtagtgcgtaataccaaagagacgcagattgacgttcaggtgtggctggatcgtgaaggtggcagcaagattaacaccggcgttggcttctttgatcatatgctggatcagatcgctacccacggcggtttccgcatggaaatcaacgtcaaaggcgacctctatatcgacgatcaccacaccgtcgaagataccggcctggcgctgggcgaagcgctaaaaatcgccctcggagacaaacgcggtatttgccgctttggttttgtgctaccgatggacgaatgccttgcccgctgcgcgctggatatctctggtcgcccgcacctggaatataaagccgagtttacctaccagcgcgtgggcgatctcagcaccgaaatgatcgagcacttcttccgtagcctcagttacaccatgggcgtgacgctacacctgaaaaccaaaggtaaaaacgatcatcaccgtgtagagagtctgttcaaagcctttggtcgcaccctgcgccaggccatccgcgtggaaggcgataccctgcccagcagcaaaggagtgctgtaatgaacgtggtgatccttgataccggctgcgccaacctgaacagcgtgaagtctgccattgcgcgtcacggttatgaacccaaagtcagccgtgacccggacgtcgtgttgctggccgataaactgtttttacccggcgttggcactgcgcaagcggcgatggatcaggtacgtgagcgcgagctgtttgatctcatcaaagcctgtacccaaccggtgctgggcatctgcttagggatgcaactgctggggcggcgcagcgaagagagcaacggcgtcgacttgctgggcatcatcgacgaagacgtgccgaaaatgaccgactttggtctgccactgccacatatgggctggaaccgcgtttacccgcaggcaggcaaccgcctgtttcaggggattgaagacggcgcgtacttttactttgttcacagctacgcaatgccggtcaatccgtggaccatcgcccagtgtaattacggcgaaccgttcaccgcggcggtacaaaaagataacttctacggcgtgcagttccacccggagcgttctggtgccgctggtgctaagttgctgaaaaacttcctggagatgtgatgattattccggcattagatttaatcgacggcactgtggtgcgtctccatcagggcgattacggcaaacagcgcgattacggtaacgacccgctgccgcgattgcaggattacgccgcgcagggtgccgaagtgctgcacctggtggatctgaccggggcaaaagatccggctaaacgtcaaatcccgctgattaaaaccctggtcgcgggcgttaacgttccggtgcaggttggcggcggcgtgcgtagcgaagaagatgtggcggcgttactggaagcgggcgttgcgcgcgtagtggtcggctccaccgcggtgaaaagtcaagatatggtgaaaggctggtttgaacgcttcggtgccgatgccttagtgctggcgctggatgtccgtattgacgagcaaggcaacaagcaggtggcagtcagcggctggcaagagaacagcggcgttagtctggaacaactggtggaaacctatctgcccgtcggcctgaaacatgtgctgtgtaccgatatcagccgcgacggcacgctggcaggctctaacgtctctttatatgaagaagtgtgcgccagatatccgcaggtggcatttcagtcctccggcggtattggcgacattgatgatgtggcggccctgcgtggcactggtgtgcgcggcgtaatagttggtcgggcattactggaaggtaaattcaccgtgaaggaggccatcgcatgctggcaaaacgcataatcccatgtctcgacgttcgtgatggtcaggtggtgaaaggcgtacagtttcgcaaccatgaaatcattggcgatatcgtgccgctggcaaaacgctacgctgaagaaggcgctgacgaactggtgttctacgatatcaccgcttccagcgatggccgtgtggtagataaaagctgggtatctcgcgtggcggaagtgatcgacattccgttttgtgtggcgggtgggattaagtctctggaagatgccgcgaaaattctttcctttggcgcggataaaatttccatcaactctcctgcgctggcagacccaacattaattactcgcctggccgatcgctttggcgtgcagtgtattgtggtcggtattgatacctggtacgacgccgaaaccggtaaatatcatgtgaatcaatataccggcgatgaaagccgcacccgcgtcactcaatgggaaacgctcgactgggtacaggaagtgcaaaaacgcggtgccggagaaatcgtcctcaatatgatgaatcaggacggcgtgcgtaacggttacgacctcgaacaactgaaaaaagtgcgtgaagtttgccacgtcccgctgattgcctccggtggcgcgggcaccatggaacacttcctcgaagccttccgcgatgccgacgttgacggcgcgctggcagcttccgtattccacaaacaaataatcaatattggtgaattaaaagcgtacctggcaacacagggcgtggagatcaggatatgttaacagaacaacaacgtcgcgaactggactgggaaaaaaccgacggacttatgccggtgattgtgcaacacgcggtatccggcgaagtgctaatgctgggctatatgaacccggaagccttagacaaaaccctcgaaagcggcaaagtcaccttcttcagccgcactaaacagcgactgtggaccaaaggcgaaacgagcggcaatttcctcaacgtagtgagtattgccccggactgcgacaacgacacgttactggtgctggcgaatcccatcggcccgacctgccacaaaggcaccagcagttgcttcggcgacaccgctcaccagtggctgttcctgtatcaactggaacaactgctcgccgagcgcaaatctgccgatccggaaacctcctacaccgccaaactgtatgccagcggcaccaaacgcattgcgcagaaagtgggtgaagaaggcgtggaaaccgcgctggcagcaacggtacatgaccgctttgagctgaccaacgaggcgtctgatttgatgtatcacctgctggtgttgttgcaggatcaggggctggatttaacgacggtaattgagaacctgcgtaaacggcatcagtgagttgcggggtaagcggatgcgatattgttgccgcatccggcaaaaaaacgggcaaggtgtcaccaccctgccctttttctttaaaaccgaaaagattacttcgcgttgtaattgcgtagagcattacgccccagcacaatccccgcgccaaccatgccacccagcagcaccgccagaatcaaggtaattgcctttttcgggctatcacgacgaataggtaacatcggtttcatcacataacggtaagcatgaatatcaagatcatcaacttttaagctttcgatatccagcaggttttgacgagtctgatagtagtttgggctgaacaccaacggacgggtcgcctcatgcttaatcatgctctccagcgcttcgctccccaaaaggaacaacgtatcttgtgtgatatcttcgccagtctgttgaatctgcggttttgtcacctgcgcctgattcgcatactgcaacgcttcctgaatctgacggatacgcagatctttctgctcctgcgcgactacttcctgcgttcttaaagagtcctgcaagtttttccgtcccagagcaatgttgtctttgagatccttttctagctcttgattcactttatcgtcaacttgctgaatgtattgggccaacttcatttgtgcgccctctgcagtttgcccaacataagaaacagtcaatggtaattgctggttcttaacagaaggttcgatggtaagtttttctcgttcttcctgattatccagcgtttctgctaatgcagagaaggcagaactgaagcgaccaattaacgtctcctgcaaatcgcttactttcggtgcagcctgaccatagataacattcatggcattgttatagccagcaatttgccccacgtcgggctgagtgataattgctgtactcgtccatttctccttcgctactgccaaatatccaatagccagggcaatagccacaatgacggaaatgatgattgtcatcttgccacgccacaactgcactagtaaatcaatcaaatcaatctgttccgggtcatggttttgcccagaaacattattattttctactctcatcattaccctaactgacggaaatttccaagtccgcatagtttagcgataatcctcgtgaatgctataggataagtgataaaaataatgaattgttgtgtaagtaacaaaagacaatcagggcgtaaatagccctgataacaagatgttagtcgctgccaaagagatcgcgggtgtataccttatctgccacatccttaagctcttctgccattcggttagagataatgacgtcggcttgttgtttgaaggtggcgagatcacgttccaggcgagagttgaagaaactgtcttctttcatcactggctcgtagatgatcacttcaacacctttcgccttgatacgtttcataatcccctgaatagaagacgcacggaagttatcactaccgctcttcataatcagacgataaatacccaccacttgcggcttgcgactcaaaatggcatcggcaataaaatctttacgcgtgcggttagcatcgacaattgcgctgatcaggttattcggcacagactggtagttcgccagtaactgcttggtatctttcggcagacaataaccaccataaccaaagctcggattgttgtaatggttgccaatacgtgggtcgagacaaacgccttcgattatttgacgggaattcagacctaaactttctgcatagctatccagttcgttaaagtacgccacgcgcatcgccaggtaggtgtttgcaaaaagtttaatcgcttctgcttcagtggagtcggtaaacagcatcgggatattttgcttaatcgcgccttcctgtaacagagcagcgaaacgttctgcgcgttcactacgctcaccgatgacaatacgactaggatggagattatcgtaaagggctttaccctcacggagaaattccggggagaatataatattttcagtgcgatatttcttatgcatcgctgcggtaaaaccaacgggaaccgtacttttgatgaccataaccgcataaggatttatctcaactacgtctttaattacactttctacactggatgtattgaaataattagttttaggatcatagtcggttggagtggcgatgatgacataatcagcatcccggtaggcttcatttttatctaatgtggcattaaagtgtattttatcactttgcaaaaactgctgaatttccttatcaacaataggagatatccgatcattcagcatagcaacgcgactcggtaaaatatctaatgccacaacctcatgattttgtgcgattagaagcccgttactcaagcctacatagccagtaccggaaatggtgattttcatttcatgctctcagaattaacttaactgtgaatcatgatgtttttagcatcctgataagagctaaaagttttaacgctacgttgttcgatggtcaacgcaacgaaaaacaattcagattttctttataagaatagctgatatttattaagttaatattaagcagtgaaatttagtctataagatatttggcaaaaaaaagcccggtgcaatatacgccgggcctcaattttattgttggttaaatcagattaatccagccattcggtatggaacacaccttctttatcaatacgcttataagtatgcgcaccaaaatagtcacgctgtgcctggatcaggttcgcaggcagaacagcagcacggtagctgtcgtaataggcaaccgctgcggagaaggtcggaaccggaataccgttctgtactgcataagcaacgacatcacgcagcgcctgctggtagtcatcggcaatttgcttgaagtacggagccagcaacaggttagcgatctgtggattttcggcataagcatcggtgattttctgcaggaactgcgcacggatgatgcagccagcacggaaaatcttcgcgatttcgccgtagttcagatcccagttgtactcttcagacgcagcacgcagctgagagaagccctgggcgtaagaaacgattttgcccagatacagcgcacgacgaactttttcgatgaactcagccttgtcgcctgctggctgtgcttgcggaccagagagaactttagatgcggcaacacgctgatctttcagagaagagatataacgtgcaaacacagactcggtaatcaggctcagcggttcgccgagatccagcgcgctctggctggtccatttaccggtacctttgttagccgcttcatccaggatcacatcaaccaggtagttaccgtcttcatcttttttggtgaagatatctttggtgatgtcgatcaggtaactgctcagttcaccgttattccactcggtaaaggtctgcgccagttcttcgttggtgaggttcaggccacctttaagcagagaataggcttcagcaatcagctgcatatcgccgtattcaataccgttgtgaaccatcttcacatagtgacctgcgccatcggcaccaatataggtaacgcatggttcaccgtcttcagctacggcggcgattttggtcaggatcggtgctaccaattcataggcttctttctggccaccaggcataatagaaggacctttcagcgccccctcttcaccgccagaaacaccggtaccgatgaagttaaagccctctgcactaagctcacgattacgacgaatagtgtcctggaagaaggtgttaccaccatcaatgatgatgtctcctttatcgagatatggtttgagggaatcaatagcagcatccgtgcctgcacctgctttcaccattaacaggatgcgacgaggcgtttccagagattcgacaaactctttcaccgtatagtaaggaaccagtttcttgcctggattttcggcaatcacttcttccgtcttctcacgggaacggttgaaaatagagacggtataaccacggctttcgatgttgagcgcaaggttgcgtcccatcactgccataccgactacgccgatctgttgcttggacattacatactcctgtcaggtgtgatcaccgcgctgaatgctcgcggcctggaatgttcgcaaataagtatacaaagtacttattaaagtataaatagcttatccatgcttatatgcttacggctttatatgtctccacatgcgatatttcttaaataatgttttattattaccacttttaattcagggataatgtgaggttattaccctcaaataatatgagataaatagtgctgcaacattgcatttttgccccgatttatccatgatcgaattgtgacatttgtcatacaacgaataggttttgtacttactatggaatggattgccgatccgtctatctgggccgggttaatcacgctgattgtgatcgaactggtcctcggcattgataacctggtctttattgccatcctcgccgaaaaactaccgccgaagcagcgtgaccgcgcacgggttaccgggctgctgctggcaatgttaatgcgcctgttactgctggcgagtatctcctggctggtcaccctgactcaaccgctgttcagcttccgcagctttacctttagcgcccgcgacttaatcatgctgtttggtggtttcttcctgttgttcaaagccacgatggagctgaacgaacggctggaagggaaagacagcaataatcccacacaacgcaaaggtgcgaagttctggggcgtggtgacgcaaattgtggtactggacgccattttcagtctcgacagtgtgattaccgccgtcgggatggtcgaccatttactggtcatgatggccgccgtggttatcgctatcagcctgatgttgatggccagcaagccgttaacgcaatttgttaacagtcacccgacgatcgttattctctgcttaagcttcctgttgatgattggctttagcctggtggcagaaggtttcggcttcgtcattccgaaaggctacctgtacgctgccattggtttcagcgtgatgatcgaggcgctcaatcagttggctatctttaaccggcgacgttttctttccgctaaccagacgctgcgccagcggactaccgaagcggtaatgcgcctgcttagcgggcaaaaagaagatgcggaactggacgccgaaaccgcgtccatgctggtggatcatggtaaccagcagatctttaatccgcaggaacggcggatgattgagcgggtacttaatcttaaccagcgtaccgtcagcagcattatgacgagccgccacgatattgagcatatcgatctcaacgcgccggaagaagaaatccgccagttgctggagcgaaatcagcatacgcggctggtggttaccgacggtgatgacgcagaagatttgctcggtgttgttcacgttatcgacctgctacaacagtctctgcgcggcgaaccgctcaacctgcgggtgttgattcgccagccgctggtgttcccggaaaccttgccgttgttacctgccctggagcagttccgtaatgcccgcacgcactttgcttttgtggtggatgagtttggcagcgtggaagggattgtgacattaagtgacgtcactgaaaccattgccggtaacttaccgaacgaagtggaagagatcgacgcccgccatgatattcagaagaatgcggacggttcctggacggcgaatggtcatatgccgctggaggatctggtgcaatatgtgccgctgccgctggatgaaaaacgtgaatatcacaccattgccgggctgttgatggagtatttgcagcgtattccaaaacctggcgaagaagttcaggtgggggattatttgcttaaaacgttgcaggtagaaagccatcgcgtgcagaaggtgcagattataccgctgcgtaaggatggcgagatggagtacgaggtgtgatggtatcggtcattttacccaatagccgaaaggaataagatgagggaaccgcgccatcggcgatttaccgccgggagcccgggttgccagggtggtggagattgagccaccctggcacgttcaccggcttgagcgttccatagtagcgaggaacatcaagtgaacggaacagccttcgatcttacatattcagaatataatgatgccgccacgaacgcctgatgcgacgctttacgcgtcttatcaggcctacaggactggtcacctggtaacttacatcttctccagcaacttcttcacatctttgccattacgggaatctttattccgctcggcccagtcattcaggcgacgtttcgcttcgtcctgtagatgtttgcgcagtaactgatccacttgcaggctgtaattgagttgctgccagttgccataaacccgcagcggtactggcgtttctttcaggaaatcaatcagtttgctttccccgttccagccacccacgacccgaatatcaaactgggtgtcgcaggtttgatctgccagattcaacatgccttcccctgtcagcgccagcacagggctttgaccttgcatgtcgtttaacgtcacgacgccatccttcaacgtcaaatcggtggtaaagcggtcaagccgcgtcacgttatcaaagttttcagcggccttcacatcaccgccattacgctctaccgcttgctgaatcatctgctggaagttcatcccttccatgcgcgtgtcggtcatttcgacatgtgcctgtccttgccagttgtggcggaatgcgtcggcatctatgtcagcaccggagaaatcaccagccagactcatttttccggtcaagctaatcggatagttaaacgccttcagaatggtaccaatctcaacgttttccagccgtggctggaagtttatccgcggatttatacttgtcgcgtccagcgtgcccggcagactaacctgtccaccgttaagtttgccctgcagttgagtaatttccagcaaaccgctcttgttggtcatttgcgtggcaacatctgtaaaattcattccgcgccagcgcacgttactggcctgcaacaaaatatcagccgtaaagccttgcagtccctgataggccggttcatcaatacggctagaaatgaccgggcgcggcaacgtactttggctctgcccctgctgcgcggcaccgttttcaccattcgcggtttcattaagcgggatgaggttgtcaagattcagttgcgggaattgcagcctcagctgccattccggtttctctgtcagcgtaacctgtgcttgcccgcttagcgtactatcattggcggtcaaactaatttggttaaaactaaggcgtttatgactctcctgccactgggcctggaaactcccctgcccctgaataccttgttttggtaaatcggcaccctgcaactgccagttaatttgttcaatagccgccgttaaatcatgcggataatcagaagcatctaccgtaccgttaagggatatcgtgagatcgcgctgatcgcgattaacccgcccggagaactcaaaactaccacgatgttggggatcttgttccatttgcaggcgaatattgcggattgtcacctgctcgtcatcttcatgctggaacaccagcacgctgtccgccaccttaagactggatatatcaaagctccatccgcgatcgtcactcagatccggcaaggtattgtcgcgcggtgcaaccggagcgtcttcactgcgcaccgcttccgtctgcggcgtcagttggatcactgccccttttagcatcacctgcttaacgctcagttgatgactcagtagtggtaaaagcgccacgtccagacgcatgttgtcggcgcgaaccagtggctggcttgcgccctgggcggtgagagacattcgcccggagaggatactaagctgcggccagacgtgccaacgcagtggcccgtcgagctgcaattgataaccgctacgtgcagcaacttgcttgaccatatagtcgcggaaatcattcggattcaccagcaacactaacgcagataacccggccaccagcacgaccaggagtatcatcagcgtcgtcagaaatcgtctcatggtatcctcaatgggcctgaattagtctttatcgattcggctggctaccgcgccctgctggttgcgatatttcgcatcttcacggcggttgtaaggtcgcaccgccgggccggaaagcggctcaaagctcagcgcaccaattaacatgcccggacgcagcgccagcggcagcttaccggagttgtagaactccagcacaatgcaaccagaccagcccggatcgatgcggtgcgcggtgacgtgcaccatcagccccagacgcgccagactggaacgcccgtccagccagcccaccagatcggctggcagcgtcacgctctccagcgtcaccgccagcgccagctctcctgggtgaagatagaacgcctcgccctcgtcgagaacgatctcatcgctcatcacgcggtcaagcgcggcgctcacttcatctttgggaccgctcagatcgataaacgctgccgtgtgaccacggaaggtacgaaatttattgcccaggcgtacatccaccgtcgcgccgttaatacgctccactggcggacgtgggttgatgctcaaacggccttcatcaagccaggcttcaatatctcggtcacacagacgcatggcattttctcctttcgcgcatcactcccttaacgccaattacgtcaagggcatactaggttatcactgaacggtacacaatttatcaagcttattcaaagaactgacttattttcgctttcaatatatcgatcgcgatgcggtttttcccgccgcgcggcacgataatgtccgcatattgtttagaaggctcaatgaattgcaggaacatcgggcgcacggttttttgatattgcgccatcacactatccatactacgcccacgctcgttaacgtcacgcttgatgcggcgcatcaggcagatatccagcggggtatcaacgaaaatggagaagttaagttcgtcacgcaaacgcgcatccgtcagcaacaaaatgccttcgagaatgatgaccttcttcggctcaaccgtcaccgtttctttcatacgcgtatgttcaacatagctgtaaaccggcaggtcaattgcgctgccgcgtttcaacgcttgtaaatgctcaagcagcagactgtgatccatcgcgctgggatggtcgtagttggtcttaacgcgttcttccatgctcagatggctttgatctttgtaatagcagtcttcgggaattacgccgatgtgttcatcaccgacttgctcacgcaattcacgataaagggtactggcaataagactcttgccggaagcgcttgcgccagcgataccgataatgacgcactgatgagactgatcagtcatatatttagcgacctgattaacctggatgttaggaagggggcgacgaagcgccaaacgcggcaattatagggatttcatccgtctgataccagtcgaatagcgttgccgcgcgctcagagttaattgttgacaaagaattcccgggggcaaattacgttgatcagttttatgtaaggtaaaaaatgttaaacgcagttgcgcaaattatccgcctttacgtcactttatgagcaattcgcatataaaatgtaaaacttttgtactagcataaacacagaaacgaatactggcgaccaggtcttgcggataaagcggtaatgagcaaacaaagtcagcatgtattaattgccctgccccacccgctgcttcacctggtcagtttaggtttagtcagctttatctttacccttttcagccttgagcttagccagtttggcacccaactcgccccactgtggttcccgacgtccatcatgatggtggcgttttatcgccatgccgggcgcatgtggccgggaattgcgctgagctgtagcctgggaaatatcgccgcatccatcctgcttttttccaccagcagcctgaacatgacctggacgaccatcaatattgttgaagccgtggtcggggcagtgctgctacgtaaattgctgccgtggtataaccccttgcaaaatctggctgactggctgcgtctggcactcggcagcgccattgttccgcctctgttggggggtgttctggttgtcctgctgacgcccggagacgatcctctcagggcatttttgatatgggtactgagtgaatccatcggcgctctggcactggtgccgctgggattgttatttaaaccacactatctgctgcgccatcgcaacccacggttgctttttgagagcctgctcacgttagccatcacactgacgttaagctggcttagcatgctgtatctgccgtggccttttactttcattattgtgctgttgatgtggagcgccgtgcgtctgccacgaatggaagcctttttgatcttccttaccacggtgatgatggtgagcctgatgatggccgcggatccccccctgcttgctacgccgcgtacgtacctgatgagccatatgccgtggctaccgtttttgctgatcctgctgcccgccaacatcatgaccatggtgatgtatgcctttcgtgcggaacgcaaacacatttccgaaagcgaaacccactttcggaacgcgatggaatattccgctatcggtatggcgttagtgggcaccgagggacaatggctgcaaaccaacaaagcgctctgccagtttctcgggtacagtcaggaagagctgcgcggactcacctttcagcaactgacctggccggaggatctcaataaagatctccaacaggttgaaaagctgataagcggtgaaataaacacctatagtatggaaaaacgctactacaaccgcaatggcgatgttgtctgggcgttgcttgccgtcagtctggtgcgccacacggatggcacgccgctctattttatcgctcagattgaagacattaacgagctaaaacgcaccgaacaggtcaatcagcaactgatggagcgcatcactctggctaacgaagcgggcgggattggcatctgggagtgggagttgaagccgaatatttttagctgggataagcggatgttcgagctgtatgaaattcctccacatatcaaaccgaactggcaggtgtggtacgagtgcgtgctgccggaagatcgccagcatgccgaaaaagtgattcgtgatagcttgcaaagtcgcagcccctttaaactggaatttcgcattaccgtaaaagacggtattcgccatatccgcgccctcgccaaccgggtactgaataaagaaggcgaagtcgaacgtctcctcggcatcaatatggatatgaccgaagtgaaacagcttaacgaggcattgtttcaggaaaaagagcgcctgcacattacgcttgattccatcggtgaagccgtggtctgtattgatatggcgatgaaaattacctttatgaatccagtggcggagaagatgagcggctggacgcaggaagaagcgttaggtgttccgctcctgacggtgttgcatattacttttggcgacaacggaccattaatggagaacatttacagtgccgacaccagtcgttccgcgatcgagcaagatgtggtgttgcactgtcggagcggcggcagttacgacgtgcattacagtattacgccgttaagtactctggacggcagcaatattggtagcgttctggtgattcaggacgttaccgaaagtcgcaaaatgctgcgccagctgagctacagcgcctcccatgatgcactgacgcatctcgccaaccgcgccagttttgagaaacaactgcgtatcctgctgcaaacggtaaacagtacacatcagcgacatgccctggtgtttatcgatcttgatcgctttaaagcggtgaatgacagcgccgggcatgcggcgggtgacgctttgctgcgcgaactggcgagcttaatgctgagtatgctgcgttccagcgacgtgctggcgcgactcggtggggatgaatttggtctgctgctaccagactgtaatgttgaaagcgcgcgttttatcgctacacgcattatcagtgccgtgaatgactatcactttatatgggaaggccgtgtgcatcgggtaggtgccagtgccgggattaccttgattgatgacaacaatcatcaggcggcagaagtgatgagccaggctgatatcgcctgttatgcctccaaaaatggtggccggggccgggtgacggtttacgaaccgcagcaagctgccgcacatagcgaacgggcggcgatgagccttgatgaacagtggcggatgattaaagagaatcagttgatgatgctcgcccacggtgtcgctagcccacggatcccggaagcgcgtaatttgtggctgattagtcttaagctctggagttgcgaaggcgagattattgatgaacaaacatttcgtcgtagcttcagcgatccggcgcttagccatgctcttgaccgccgggtattccacgaatttttccagcaggccgcaaaagcggttgccagtaaaggcataagcatctccctccccctttccgttgccggtttgagtagcgccacgctggtgaatgatctgcttgagcagctggaaaatagccctctaccaccacggttattacatctgattattccggctgaagcgattttagatcacgcagaaagcgtgcaaaaactgcggctggcgggatgtcggatagtgctcagccaggtgggccgcgatctgcaaatcttcaacagcctgaaagcgaatatggcagattacctgctacttgatggtgagttatgcgccaacgtgcagggtaatttgatggatgagatgctgattacgattattcaggggcacgctcagcgactcgggatgaaaaccatcgccgggccagtcgttttacccttagtgatggatacgctttctggcatcggcgtcgatctgatttatggtgaggtgattgccgatgcccaaccgctggatttgctggtgaatagtagttatttcgcgattaactgaggcgtgcttccccatcgcctgatgcgacgctaacgcgtcttatcatgcctacaaatcgctcattccccaggccggataaggcgctcgcaccgcatccggcgaccaacgtcatgcttcgtctggttgccagccttccgtataccagatatgcaacagcgcataagaacgccagggcttccagcgctcggcataacggcggatttgcgccggtgtcattcccggaaatcgctgtttaatcagataatcatccggcaggaaaacatctttcgcctgccagccacgcaaagcaaaataattcgccgtccagcgcccgatacccggaaaagtttgcagcgttttcatcgcctgctccacatcgcccggtattgtcattggtaaggtgccctccagcgccgcatttgccagatgaatcagcgcctctgcccgtttcaacggcatacctaacgcttttaatgcctgcgggtctgctgctgccagccgctgaggcgtcgggaagcagatatactccggaaaatcatccagccgttcgccataaagctgtgccactctggcggtcaattttgccgccatcgccacgctcaccagttggcctaaaatcgcccgcacgccctgctcaaaagcatcaacacagccgggtaaacgcaatccgggccgcgccgcgcctaacctgcccaacgcaccgttaacaatttgtgggttacattgcagatcaaacaggcggctcattttcgccagacactctgcggcaacaggttctaaacctgcacttaaatttatgtgcagagtatggcgggctatatccggaatagcagtcaccacgccgcgatattcgcccaccgccagactacgggcataataactgtccgcgaccgtttccacactgctcaccgcacgggcggcgagaaatcccaacatccagctccagtcatacggcggctgccagttcagggtatacatcgcatctccttattcatccgctttcagcataaacgttattcagacgctgcgctttgctttcatattccggttgtcgcgacggcaacatttcgctaaagtcacgccccttcttcaccggcatggggattatttcgtgtttattggttttgattacggtacagcaaactgtagtgtggcggtcatgcgtgacggtaaaccgcatttgctaaaaatggaaaacgacagcacgctgctgcctagtatgctttgcgcgccaacgcgtgaagcggtaagcgaatggctgtaccgccatcatgatgttccggcagacgacgatgaaacgcaggcgctgttacgtcgggcgattcgttataaccgcgaagaagatatcgatgttacggcgaaaagcgtgcagttcggtctttccagtctggcacagtacattgatgatccagaagaagtgtggtttgtgaaaagtccaaaaagcttcctcggtgccagcggcttaaaaccgcagcaggtagcgctgtttgaggatctggtctgcgcaatgatgttgcacattcgccagcaggcgcaggcacagctgccagaagcgattactcaggcggtgattggtcgtccgatcaacttccaggggctgggcggtgatgaagcaaacacccaggcgcaagggattctggaacgcgcggcgaagcgtgccggattcagggacgtggtattccagtacgagccggtcgcggctgggctggattacgaagccaccttgcaggaagaaaaacgggtgctggtggtggatatcggcggtggtacgactgactgtagtttgctgctgatggggccgcagtggcgtagccgtctcgatcgtgaagccagcctgctgggtcacagtggttgccgtattggcggtaacgatctggatatcgcgctggcgtttaaaaacctgatgccactgctgggtatgggtggcgaaaccgaaaaaggcatcgccctgccgatcctgccgtggtggaatgcggttgccatcaacgacgtacctgcgcagagtgatttctacagtagtgccaacggtcgtctgcttaacgatctggtacgcgatgcccgcgaaccggaaaaagtggccctgttacagaaagtctggcgtcagcgtttaagctatcgcctggtgcgtagcgcagaagagtgcaaaattgctcttagtagcgtagcggaaacccgcgccagtctgccgtttatcagcaatgaactggctacgctgattagccagcgagggctggaaagcgccctcagccagccactgacgcggattctggaacaggtgcaactggccctggataacgcccaggaaaaaccggacgttatctacctgaccggcggtagcgcccgttctccgctgattaaaaaagcgctggcagaacagttgccgggcattccgattgcaggcggcgatgactttggctccgtcaccgccgggctggcacgctgggcggaagtggtgtttcgttaattgaaaaatggctcagcagcggcttaaatctgcctgcgcctgagccagtttttctgctgcctgacgtaacggttccatcaacggcatggtccgtgctggagcatgaaggcggaatcgctgcaactctgtcgcgccgactgtcaacgcgctttccagccgatgtcgtttggcggtcattttcgccattaccgcttgtctgtctgctggcgttatcgcttcattcggcctgaacacaaaacggcgttcacagctcgctttccagtcgataaccgcctgggtcagatggtcgccaaaccctttcacttgcttaacgccacgacgggtaacatctgcggctgtttcaataccaaaagaccgtaacgccgctttacgcgcagggccaacgccgggaatagaggcaacatcaataaaaaatccctccagaaacttctgcttctgccgttcccttgcagtgtcatgaagtgctgccagagcgcgtttctcttcttccggtaacccgagaatttcgtccttcattttttcgagcatcgtccgtttggcgataaaaccttccaggccgcctacctgctggatctggcggactaaatggtcatagtccattttcgcacgattaaatgcctcacggcgttgctgaacttctgctttgtacgctttgcttgtcagactgccaataatccagatagccgccagcacaggaaccaaaataatataacgcggttctgcctgaaggccgcaaagcagcaggcttaatgcactcagtgcgatctcaagcagaatgatgtattcgcgccgtaacaggcctaaaggaagcggcctgccagtcggttggaaatgatcgggtaatggcagttgcaatgctggcggtgctacactcgccatcaccatcgcccagactttcgccagcacaaaattcccgccggtggtaatgacctcttcgccgagatcaataaaatagataacaccttgattatccagcgcacaccacgggcagtcagtcaaatgagcggggtaaacatgcattgcactaacgatacatttctttaactgttggcgtagagagtccagtgccgctacccacgctttagccgtcggacgcccggttgccacgccactttccgtgaatgcctgctgaaacatggcttcaacatcactcggtaacatgcttagcggaatagatcgtggcggcggttttaaaccacgtcgctgattatcactcgcgtaggcataacggaaatgggtaatatccgtctccagcgcattacccgcatcagagataagcggcacaccagaataaggatgccgcccaccaaacaagacgtgaaaaattagcaacgcaaggccaaaattatcgtgattttctgtgcgttcaaaaccgacaaaacttggcaaggtttgtagctctggcggcgtaaaatggctcacgccgacttcgcataaatgcagtgtgccattggcgttaatttgaaaggagtcgctatcaatcagtaccactttgctgtcgcgacctaccataaaactgttctggtttacgtcacccacgacgtgcccgtgctcgtgaaccgtagcaaaagaactagcaatattgcgcgcaacatagagtagaaaatcccacgcacaatgagggtaactctggcgacgatgtgccgggctatagatcatatgaatcggttctttaccagaaacttttggcatcataaaaccgataacttttccgcctcgtccaccgtgaagcgttgcctgcggccaggcgacataattcaacaactgcgcgtcagctgtcgcagccataaaggcaagtttgtcctgttttaaggcgggtggcggcgtgtgataaatcttggcgacgctatcgacaaactcctcgatatcataaaccgcgccttcaccacctttgcccagttcacggccaagagtggtcaattcacctgtgcttgtaaatacttttatatttgttttcataatatttcgcgggtagttatattatatttcaatgaataataacaactaaccattaaaattatttctatatggggaaaacccactcaagaataaaaatgataatgcaattttatcaggatacaattcaatttcggcctgataatgattaacttccacaggtttttgctaactttgactacaaagggattctggagaaaaaatgaaaaagatattacttatgttgagtctgctattttttactaccgcgggctttagtgaagttagcgatacgttagtgacgggaggttatgataaacaagcgatgtctgacgcgattaaacatgcgcggaaagaaaccgataaattcatcgaggttatgaataaaaaagatgccgatactttcgcagtcaaagccccgataaccgatcacggaagaaccgagcatttctggcttacggatgtcacttattctaacggcatgtttattggcgtaatcagcaatgaccctggtattgttacaaacgtagaatatggccaggagtggaaaatcaagaaagaagatattagtgactggatgtatacgcgcggggataaaatttacggcggttataccattgatcctttattggtcacctatccaaaagaagaagccgacgagctaagagcaaaattagttcgctaatcagccgttatatttattgtttaaactggcggttgaattgttgtcttcaaccgccatgagaaactcactctgcccacagcgccagtgccaacgttttatcatcatccgtacgctcgtttaccgccgggctggacaaaaactgctttaacaattcaggtaataaatcgagttgttcctgcgttgctgccgccagtccattgaaaaacggggtaaagaaaggcacatgaggagaattatccagcatatttaacgccagtcgctggataccatccgtaaatgctgcaactttgtgcgcacgcccagtgctggtgagagtttccagtctggaaacggcatcttcgtcggtaatgaagtgcgtcatgttggcatattcacccgccatcggcgtgagaggcaattgcagaccgtgacccaaatctaccaccacgccgccatcgccaatctgcataatcaaggtgccgtcagggctactaatcagtcccagaaatgtgcaggcaaaatcgcgaaccgctaattctttggcttccgcctcggcaaaaagtcgttgacgaatggtcagtaccatatttgtggcgaggacatcattaagccccaattccccgccctgcactttttggctcatataagccatcgcttcattgacggcgagcatcgcgccttcgccaccctggctgacactgcctgcgccatcagcgacaaatacgctcaataatggctgctggtcatttaaccaggcaatctgcatctggcaggcatcctgacaaggcaagtccgcgctgatgtggctcgttccaacggtacttgcatagaccagacgccagctcacacactcgtccagccttttggcgcttccagcacaacttccgttcccggcgtggagcgggaaacgctacgcaggctactggataaccagctaaacagttcacggaattgtaatccttgcagaggcaaaggctgacgaacgctaatttgtgccagcgtcttcatatccgccccctgaacaccgatggaaaagaaagcaaaccttttatcttcttccccccgaaacactttgttggctgcagcctgccactcatcggttggtgcaccatcggtaatcaggaaaatccacgggcgataatagctaataccatttgcacgatactcacgtttccgctcctctaccatatccagggctttggtaatggccgcacccattggtgtatcgccctgggcaaacaggatgggcggaaaaaaattagcggcgctggtaaagggttgttccacatgcaccgggccgaacgtcacaatgccgagttccactctttttaaagccagcggatcagcaagcagttcatcacgaaaggtaaccaatccggcgttaagttcattaataggtctaccgttcatagaaccagaaacatccagcagcaaaatgcaggggcaacgtggttccgggttactggcaaaatcgctggtggcaaacgtgatttgttcgctcataagaaatcctttcttagagaattatcgaggtccggtatcataccgactgcaataatgaaataagagcaaacgaagaaactttcagaattaggcccggcggcgcagaaaattttgctattcgcctcgcaagaacggagagccgtcgattgacactaagggcggagtgacataatttcaggagtgagggttagggagaggtttccccctccccctggtgttcttagtaagcctggaagctaatcactaagagtatcaccagtatgatgacgtgcttcatcataaccctttccttattaaaagccctcttctccgggagaggctttcccgtttcagcgtcccgctgaaatcatcggcttacctcctttcgccctgaatgcagtctatcgctaacgcgtgaataaaatagtttcctctgtgattattgcgtaacgactcgcaaagaatatttgctggcaggatcgcagactacaaagcctgcggattgacaatcttatcgtgaagacatactttcaggagtgagggtagagcggggtttcccccgccctggtagtcttagtaagcggggaagcttatgactaagagcaccacgatgatgagtagcttcatcatgaccctttccttatttatggccccttcctcgggaggggctttcccgtttcagcgtcccgctgaaatcgtcggcttacctcctttcgccatgcaagcagtctatcgctaacgcgtagataaaatagtttcctgtgttattactggatgcgtgctcgcaaatgtgcccgtcattcagacgattccagacagtgtttcataattcctccatttttctcccttattggctggctacactagtatcattccgcgaaacgtttcaggaagagaaactcttaacgatgaaaggtagttataaatcccgttgggtaatcgtaatcgtggtggttatcgccgccatcgccgcattctggttctggcaaggccgcaatgactcccggagtgcagccccaggggcgacgaaacaagcgcagcaaagcccagcgggtggtcgacgtggtatgcgttccggcccattagccccggttcaggcggcgaccgccgtagaacaggcagttccgcgttacctcaccgggcttggcaccattaccgccgctaataccgttacggtgcgcagccgcgtggacggccaactgatagcgttacatttccaggaaggccagcaggtcaaagcaggcgatttactggcagaaattgaccccagccagttcaaagttgcattagcacaagcccagggccaactggcaaaagataaagccacgcttgccaacgcccgccgtgacctggcgcgttatcaacaactggcaaaaaccaatctcgtttcccgccaggagctggatgcccaacaggcgctggtcagtgaaaccgaaggcaccattaaggctgatgaagcaagcgttgccagcgcgcagctgcaactcgactggagccggattaccgcaccagtcgatggtcgcgttggtctcaagcaggttgatgttggtaaccaaatctccagtggtgataccaccgggatcgtggtgatcacccagacgcatcctatcgatttagtctttaccctgccggaaagcgatatcgctaccgtagtgcaggcgcagaaagccggaaaaccgctggtggtagaagcctgggatcgcaccaacagcaagaaattaagtgaaggcacgctgttaagtctagataaccaaatcgatgccactaccggtacgattaaagtgaaagcacgctttaataatcaggatgatgcgctgtttcccaatcagtttgttaacgcgcgcatgttagtcgacaccgaacaaaacgccgtagtgatcccaacagccgccctgcaaatgggcaatgaaggccattttgtctgggtgctgaatagcgaaaacaaggtcagcaaacatctggtgacgccgggcattcaggacagtcagaaagtggtgatccgtgcaggtatttctgcgggcgatcgcgtggtgacagacggcattgatcgcctgaccgaaggggcgaaagtggaagtggtggaagcccagagcgccactactccggaagagaaagccaccagccgcgaatacgcgaaaaaaggagcacgctcctgatgcaggtgttacccccgagcagcacaggcggcccgagccgcctgtttattatgcgtcctgtggccaccacgctgctgatggtggcgatcttactcgccgggattatcggttatcgcgccctgcccgttagcgcgctgccggaagtggactatccgaccattcaggtggtcacgctctacccaggtgccagcccggatgtcatgacctctgccgttaccgcgccgctagaacgccagttcgggcagatgtctggcctgaaacagatgagcagccaaagttccggcggtgcgagtgttatcactttgcagttccagctaacattaccgctcgatgtcgccgagcaggaagtgcaggccgcgattaacgctgcgaccaacttgttgccgagcgatctgcctaacccgccggtttacagcaaagtgaacccggcagatccgccgatcatgacgctcgccgtcaccagtaccgccatgccgatgacgcaagtggaagatatggtggaaacccgcgtcgcgcagaaaatcagccagatttccggcgtcggcctggtgacgctttccggcggtcagcgtccggctgttcgcgtcaaacttaacgctcaggcgattgccgccctcggcctgaccagcgaaaccgtgcgcaccgccattaccggcgctaacgttaacagcgcaaaaggtagcctcgacggcccttcccgtgcggtcacgctttccgcgaacgaccagatgcaatccgccgaagagtatcgccagctaatcatcgcctaccagaacggcgcgccaattcgtctgggcgatgtcgcaactgtagagcaaggtgcagaaaacagctggctcggcgcgtgggcgaacaaagaacaggccattgtgatgaatgttcagcgccagcccggtgctaacattatctccaccgccgacagcattcggcagatgctgccacagctcactgagagtctgccgaaaagcgtgaaggtgacagtgctttccgatcgcaccaccaatatccgcgcatccgtcgatgatactcagtttgaattgatgatggctatcgcgctggtagtcatgattatctacctgtttttgcgcaatattccggcgaccatcattcccggtgttgctgtaccgctgagcttaatcggcactttcgcggttatggtgtttctcgattttagtatcaataacctgacactgatggcgttaactatcgccaccggattcgtggtcgatgacgccatcgtggtgatcgaaaacatttcccgctatatcgaaaaaggcgaaaaaccgttggcggcggcgctcaagggcgcaggtgaaatcggctttaccattatcagcctgaccttcagtctgattgcggtgttgatcccactgctgtttatgggcgatatcgtcgggcgactgttccgcgaatttgctattaccctggcggtagcgattttgatcagtgcggtggtgagcctgaccctgacaccgatgatgtgcgcgcggatgctcagccaggagagcttgcgtaaacagaaccgcttctcccgtgccagcgaaaaaatgttcgacaggataatcgccgcctatggtcgtggactggcgaaagtgctgaatcatccgtggctgaccttaagcgtggcactcagcacgctgctgcttagcgtgctgctgtgggtgttcattccgaaaggtttcttcccggtacaggacaatggcattattcagggcactttgcaggcaccgcaatccagctcctttgccaatatggcccagcgacaacgccaggtcgcggacgtgattttgcaggatccggcagtgcaaagcctgaccagttttgttggcgttgatggcactaacccgagcctgaacagtgcacgtttacaaatcaacctcaaaccgttggatgaacgtgatgatcgggtgcaaaaagtcatcgcccgtctgcaaacggcggtagataaagtgccgggcgtcgatctcttcctgcaaccaacgcaggatctgactattgatactcaggtcagccgcacccagtaccagtttaccttgcaggccacgagtctggatgcgctcagtacctgggtgccacagttgatggaaaaactccagcaactgccacagctttctgatgtctccagcgactggcaggacaaagggctggtggcgtatgtcaatgttgatcgcgacagcgccagccgtctggggatcagcatggcggatgtcgataacgccctgtacaacgcgtttggtcagcggctgatttccactatttatactcaggccaaccagtatcgcgtggtgctggagcacaacaccgaaaataccccaggcctcgcggcgctggataccattcgcctgaccagcagcgacggcggcgtggtgccgctaagcagtattgccaaaattgagcagcgttttgcgccgctctccatcaaccatctggatcagttcccggtaacgaccatctcctttaacgtgccggataactatagcctgggcgatgcggtgcaggcgattatggacaccgaaaagacgctgaatctgccggtggatatcaccacgcagttccagggcagcaccctcgccttccagagcgcgctgggcagcactgtctggctgattgtcgcggcggtggtggcgatgtatatcgtgctcggcattctgtacgagagctttattcacccgatcaccattctcagcacgctacccaccgcaggggttggcgcactgctggcgttgctgattgctggtagcgaactggatgtgattgcgattatcggcattattttgctgatcggtatcgtgaagaagaacgccatcatgatgatcgacttcgcgctggctgctgagcgcgagcaaggcatgagcccgcgcgaggcaatctaccaggcttgtctgttgcgttttcgtccgatcctgatgaccactctggcggctctgcttggcgcgctgccgctgatgttgagtaccggggtcggcgcggaactgcgtcgtccgttaggtatcggcatggtcggcggtctgattgtcagccaggtgctgacgctgtttaccacgccggtgatttatttgctgttcgaccgcctggcattgtggaccaaaagccgctttgcccgtcatgaagaggaggcgtaagtgaagttttttgccctcttcatttaccgcccggtggcgacgattttactgagcgttgccattaccctgtgcggcatactgggcttccgtatgctgccggtcgccccgctgccgcaggtcgattttccggtgattatcgtcagcgccagcctgcccggtgcgagtccagaaacaatggcgtcttccgttgccacgccgctggagcgcagtcttgggcgcattgccggagtcagtgaaatgacctccagcagtagcctcggcagcacgcgtattattttgcagtttgattttgaccgggatatcaacggcgcagcgcgtgatgtgcaggcggcgatcaacgctgcacaaagtttgctgcccagtgggatgcccagccgcccgacctatcgcaaagcgaacccgagcgatgcgccaattatgatcctcacgctgacgtccgatacttatagccagggtgaactgtacgatttcgccagcacgcagctggctccgacgattagccaaatcgacggtgttggtgatgtcgatgtcggaggcagcagtctgcccgccgtacgcgtcgggctgaatccgcaggcgctgtttaatcagggcgtgagcctggacgacgtacgcaccgccgtcagcaatgccaacgtgcgtaaaccgcagggcgcgctggaagatggcactcaccgctggcagatccagaccaatgatgagctaaaaaccgccgctgaatatcagccgttgattattcactacaacaacggcggcgcggttcgtctgggcgatgtggcgacggtgaccgacagtgtgcaggatgtgcgcaacgccgggatgaccaacgccaaaccggctattttactgatgatccgcaaactgccggaagccaatattatccagacggttgacagcatccgggcaaaattaccggagttgcaggaaaccattccggcggcgattgatctgcaaattgcccaggatcgctcccccaccattcgcgccagcctggaagaagtcgagcaaacgctgattatcagcgtggcgctggtgattctggtggtgtttttattcctgcgcagcggtcgcgccactattattcccgccgttagcgtgccggttagcctgattggtacgtttgcggcgatgtacctgtgcggattcagtctcaataaccttagcttaatggcgctcaccatcgctactggtttcgtggtggatgacgccatcgtggtgctggaaaacattgcacgtcatctggaagcgggaatgaaaccgttgcaagccgcactgcaaggtactcgcgaagtcggttttacggtgctgagcatgagtctgagtctggtggcggtgttcctgccgctgctgttgatgggcggattgccgggccgactgttacgcgaatttgccgtgacgctttctgtcgccattggtataagcttgctggtttctctgacattaacgccaatgatgtgtggctggatgctgaaagccagcaagccgcgcgagcaaaagcgactgcgtggttttggtcgcatgttggtagccctgcaacaaggctacggcaagagtctaaaatgggtgctcaatcatacccgtctggtgggcgtggtgctgcttggcaccattgcgctgaatatctggctgtatatcagcatcccgaaaaccttcttcccggagcaggacactggcgtgttgatgggcgggattcaggcggatcagagtattagctttcaggcgatgcgcggtaagttgcaggatttcatgaaaattatccgtgacgatccggcagtggataatgtcaccggctttacaggcggtagccgagtgaacagcgggatgatgtttatcaccctcaagccacgcgacgaacgcagcgaaacggcgcagcaaattatcgaccgtctgcgcgtaaaactggcgaaagaaccgggggcgaatctgttcctgatggcggtacaggatattcgcgttggtgggcgtcagagcaacgccagctaccagtacacgttgttatccgacgacctggcggcactgcgagaatgggagccgaaaatccgcaaaaaactggcgacgttgccggaactggcggacgtgaactccgatcagcaggataacggcgcggagatgaatctggtttacgaccgcgacaccatggcacggctgggaatcgacgtacaagccgccaacagtctgttaaataacgccttcggtcagcggcaaatcagcaccatttaccagccgatgaaccagtataaagtggtgatggaagtggatccgcgctatacccaggacatcagtgcgctggaaaaaatgttcgttatcaataacgaaggcaaagcgatcccgctgagctatttcgctaaatggcaaccggcgaatgccccactaagcgtgaatcatcagggattaagcgcggccagcaccattagctttaacctgccgaccggaaaaagcctcagcgacgccagtgcggcgatcgatcgcgcaatgacccagcttggtgtgcctagcacggtgcgcggcagttttgccggcacggcgcaggtgttccaggagacgatgaacagccaggtgatcctgattatcgccgccatcgccacggtgtatatcgtgctgggtatcctttacgagagttacgtacatccgctgacgattctctccaccctgcccagcgcgggcgttggagcgctgttggcgctggagctgttcaatgccccgttcagcctaatcgccctgatagggatcatgctattaatcggcatcgtgaagaaaaacgccattatgatggtcgattttgcgcttgaagcccaacggcacggtaacctgacgccgcaggaagctattttccaggcctgtctgctgcgttttcgcccgattatgatgactaccctggcggcgctgtttggtgcgctgccgctggtattgagcggcggcgacggcagcgagctgcggcaacccctggggatcaccattgtcggcggactggtaatgagccagctccttacgctgtataccacgccggtggtgtatctctttttcgaccgtctgcggctgcgttttagccgtaaacctaaacaaacggtaaccgagtaaatgacagatcttcccgacagcacccgttggcaattgtggattgtggctttcggcttctttatgcagagcctggacaccaccatcgtaaacaccgcccttcccagtatggcgcaaagcctcggggaaagtccgttgcatatgcacatggtcattgtctcttatgtgctgaccgtggcggtgatgctgcccgccagcggctggctggcggacaaagtcggcgtgcgcaatattttctttaccgccatcgtgctgtttactctcggtagtctgttttgcgcgctttccggcacgctgaacgaactgttgctggcacgcgcgttacagggcgttggcggcgcgatgatggtgccggtcggcagattgacggtgatgaaaatcgtaccgcgcgagcaatatatggcggcgatgacctttgtcacgttacccggtcaggtcggtccgctgctcggtccggcgctcggcggtctgctggtggagtacgcaagctggcactggatctttttgatcaacattccggtggggattatcggtgcgatcgccacattgctgttaatgccgaactacaccatgcagacgcggcgctttgatctctccggatttttattgctggcggttggcatggcggtattaaccctggcgctggacggcagtaaaggtacaggtttaagcccgctgacgattgcaggcctggtcgcagttggcgtggtggcactggtgctttatctgctgcacgccagaaataacaaccgtgccctgttcagtctgaaactgttccgtactcgtacctttagcctgggcctggcggggagctttgccggacgtattggcagtggcatgttgccctttatgacaccggttttcctgcaaattggcctcggtttcagcccgtttcatgccggactgatgatgatcccgatggtgcttggcagcatgggaatgaagcgaattgtggtacaggtggtgaatcgctttggttatcgtcgggtactggtagcgaccacgctgggtctgagcctggtcaccctgttgtttatgactaccgccctgctgggctggtactacgttttgccgttcgtcctgtttttacaagggatggtcaacagcacgcgtttctcctccatgaacaccctgacgctgaaagatctcccggacaatctggcgagcagcggcaacagcctgctgagcatgattatgcaattgagcatgagtatcggcgtcactatcgccgggctgttgctgggactttttggtagtcagcatgtcagcgtcgacagcggcaccacacaaaccgtctttatgtacacctggcttagcatggcgttgatcatcgcccttccggcgttcatctttgccagagtgccgaacgatacgcatcaaaatgtagctattagccggcgaaaaaggagcgcgcaatgaagttctggcgacccggtattaccggcaaactgtttctggcgattttcgccacctgcattgtcttgctgatcagtatgcactgggcggtgcgtatcagttttgagcgtggctttattgattacatcaagcatggtaatgaacagcgattacaactgttaagtgatgcgcttggcgagcagtatgcgcagcatggcaactggcgcttcctgcgcaacaatgatcgctttgtctttcagatcctgcgtagttttgaacacgataatagcgaagataaacccggcccgggtatgccaccgcacggctggcgtacccagttctgggtggttgatcaaaacaacaaagtgctggttggtccgcgagcgccgattccacctgacggtacacggcgacccattctggtcaacggtgcggaagttggcgcggtgatcgcctcccccgttgagcggttaacgcgcaatactgatatcaatttcgataaacaacagcggcaaaccagctggttgattgtcgccctggcaacgttactcgcggcacttgccacttttctgctggcgcgcggtttactggcaccggtaaaacgacttgtcgatggcacgcacaaactggcggcgggcgatttcactacccgcgtaacgcccaccagtgaagatgaactgggcaaactggcgcaagacttcaaccagcttgccagcacactggagaaaaaccagcaaatgcggcgcgattttatggccgatatttctcacgaactgcgtacgccattagcggtgctgcgcggtgaactggaagccattcaggatggcgtgcgtaaattcacgccggagacggtggcgtctttacaggcggaggtcggtacactgaccaaactggttgacgatctccatcagttgagcatgtctgatgaaggcgctctcgcctatcaaaaagcaccggtagatttgatcccactgctggaagtggcgggcggcgcatttcgcgaacgattcgccagtcgtggcctgaaactgcaattttccctgccagacagtattaccgtatttggcgatcgcgaccgtttaatgcagttattcaataacttactggaaaacagcctgcgctacactgacagcggcggcagcctgcaaatctctgccgggcagcgcgacaaaacggtgcgcctgacctttgccgacagtgcgccaggtgtcagtgacgatcagctacaaaaattgtttgaacgtttttatcgcaccgaaggttcccgcaaccgtgccagcggcggttccgggctggggctggcgatttgcctgaacattgttgaagcacataatggtcgcattattgctgcccatagcccttttggcggggtaagcattacagtagagttaccgctggaacgggatttacagagagaagtatgaccgagttaccaatcgacgaaaacacaccgcgtattttgatcgtggaagatgaaccgaagctggggcagttgctcattgattatctgcgtgctgcgagctatgcgccgacgcttatcagccacggcgatcaggtactgccgtatgtgcgccagacaccaccggatctgatcctgttagatctgatgctccctggcaccgatggcctgacgctgtgccgggaaattcgtcgtttttctgacattccgatcgtgatggtgacggcaaaaatcgaagagatcgatcgcctgctggggctggagattggcgcagatgattatatctgtaagccgtacagcccacgggaagtggtagcgcgcgtcaaaaccattttgcgccgttgcaaaccgcagcgcgagttgcagcaacaggatgctgaaagcccgttgattatcgacgaaggtcgttttcaggctagttggcgcggtaaaatgcttgacctgacgcctgcggaatttcgtctgctgaaaacgctctctcacgaaccaggaaaagtgttctcccgcgagcaattgctcaatcatctttatgacgactaccgcgtagtaaccgaccgcaccatcgacagccacattaaaaacctgcgccgcaagctggaatctctcgacgccgaacagagttttatccgcgccgtttatggcgtcggttaccgctgggaagccgacgcctgccgcatcgtttaattttagcgacattattttgttagccggagatggcgttcagaccagatccggcaacattatcccacgcatggtcagcaaactgacattatctctccgccctggcaggcatcagaaaatcgctcatactttaatcggtaaacagcacctttagaatcctgtcgtttgttttcgatttcaaaatataatgaaattatttgtttttaaatatcgagataacgatcacaaaaacgacaatatgaaaattattcgaggagtgaaaggcaaaaaaacggcctcccgatagggaagccgtagcaaagtgcgcgtgtttttatgccggatgcggtgtaaacatacgtggcagtgctatgtaggcatgataagacgcttcagcgtcgcatcaggcataggttgccggatgcagcgtaaacgccttatccgtcctacggggtggtgttgttcgtataaggcgtatcaggcgatagtaattttgctatcgagataaacgtcctgcacggcgttaatcagtttcacgccgtcagccatgcttttcttgaacgctttacgtccaagaatcagccccattccgcctgcgcgtttgttgataaccgcagtacgcactgcatcgctgaggtcagtttcaccgcccgcagcaccgccggagtttatcaacccagcccgacccatatagcagttagctaactgataacgcaccagatcaatcgggttttcgctggtcaatttgctgtaaacacgatcgtcggtgtaaccgtaattaattgctttatagccgccgttattttccgccattttttgtttgacgatatctgcaccgatggttgccgccagatggtttgcctgaccggtcaggtcggcggaaacatggtaatcaacgccatctttcttaaaggcggagttacgcaaataggcccacagcactgtcaccatacccagctcgtgcgcacgttcaaaagccgcagaaatttcttcaatctggcgacgactctcttcgctgccaaaatagatagtcgcaccaaccgcaaccgcgcccatgttgaacgcctgctccacgctggcatacagcgtttgatcgtaggtattcgggtaacttagcgtctcgttgtgattaagtttgacgaggaatggaatgcgatgcgcataacgccggcttacgctcgccagcacgccgtaagtactcgccacacagttacagcccgcttcgatcgccagttcaacaatgtttttcgggtcaaagtagagcgggttagcagcaaaactagctccggcagagtgctcaacgccctggtcaaccggcagaatagaaagatatcctgtgccagccagacgcccggtgttgtacaacgtctgcatattacgtaacaccgctggcgggcgattattgtcaatcattacgcggtctacgtagtcatgtccggggagataaagctggtcagaaggaattgtcatacaacggtgctgtaaaaggttgtcggcgtctttgccaagcaactgcgcaatatctgtcattactatgctcccgtaaattccgattggatatcggctatggattgtcctggcccgccttttgcgggcaatcataatcctggtcgttacgggcgagtttttccatcttttggatgttttttcagcgttttctgttggctcgattcatcagaaaaaatgttagcgcggtcaagttttcaccgcaaaggtatttaaaaggtattattaagtggtattgtcatcgcgtaccttacattacctgtcatgaaggaattaaaagatgaaaacaacagcaaagctgagcttcatgatgtttgttgaatggtttatctggggcgcgtggtttgtgccattgtggttgtggttaagtaaaagcggttttagtgccggagaaattggctggagctatgcctgtaccgccattgcggcgatcctgagcccaattctggttggctccatcactgaccgctttttcagcgcgcaaaaagtgctggcggtattgatgttcgcaggcgcgctgctgatgtatttcgctgcgcaacagaccacttttgccgggttcttcccgttactgctggcctacagcctaacctatatgccgaccattgcgctgactaacagcatcgcttttgccaacgtgccggatgttgagcgtgatttcccgcgcattcgtgtgatgggcactatcggctggattgcctccggtctggcatgtggtttcttgccgcaaatactggggtatgccgatatcagtccgactaacatcccgctgctgattaccgccggaagttctgctctgctcggtgtgtttgcgtttttcctgcccgacacgccaccaaaaagcaccggcaaaatggatattaaagtcatgctcggcctggatgcgctgatcctgctgcgcgataaaaacttcctcgtctttttcttctgtagtttcctgtttgcgatgccactagcgttctattacatctttgccaacggttatctgaccgaagttggcatgaaaaacgccaccggctggatgacgctcggccagttctctgaaatcttctttatgctggcattgccgtttttcactaaacgctttggtatcaaaaaggtattattgcttggtctggtcaccgctgcgatccgctatggcttctttatttacggtagtgcggatgaatatttcacctacgcgttactgttcctcggtattttgcttcacggcgtaagttacgatttttactacgttaccgcttacatctatgtcgataaaaaagcccccgtgcatatgcgtaccgctgcgcaggggctgatcacgctctgctgccagggcttcggcagtttgctcggctatcgtcttggcggtgtgatgatggaaaagatgttcgcttatcaggaaccggtaaacggactgactttcaactggtccgggatgtggactttcggcgcggtgatgattgccattatcgccgtgctgttcatgatttttttccgcgaatccgacaacgaaattacggctatcaaggtcgatgatcgcgatattgcgttgacacaaggggaagttaaatgaaaacagaacgtattctcggtgctctttatgggcaggcgttaggggatgcgatggggatgccctccgagctttggccacgcagccgcgttaaagcacactttggctggattgaccgttttcttcctggaccaaaggagaataacgcggcctgttattttaaccgcgccgaattcaccgacgataccagcatggcgctgtgtctggcggatgcgttactggaacgtgaaggcaagatcgatccggatctgattgggcgtaatattctcgactgggcgctgcgtttcgacgcctttaacaaaaacgtactaggtccgaccagcaagattgcgcttaacgccattcgcgacggtaaacccgttgctgaactggaaaacaacggcgtgaccaacggcgcagcgatgcgcgtcagcccattaggttgtttgcttccggcgcgtgatgttgattcctttattgatgatgtagcgctggcgtccagcccgacccataaatccgatctggcggttgcaggcgcggtagtcatcgcatgggcgatttctcgtgccattgacggagaaagctggagtgcgattgttgattccctgcctagtattgcgcgacatgcacagcaaaaacgcatcactacgttcagcgccagtctggcggcgcggctggagattgcgctgaaaattgtgcgcaatgccgacggcaccgaatccgccagcgaacagctttaccaggtcgttggcgcaggtaccagcactattgagtccgttccgtgcgccattgcgctggttgaactggcacaaaccgacccgaatcgctgcgccgtcctgtgcgctaaccttggcggcgacacagacaccatcggtgctatggcgacggcaatttgcggcgcgttgcatggcgttaacgctatcgatcctgcgttaaaggcggaactggatgcggtaaatcagcttgatttcaaccgctatgccacagcgctggcgaaatatcgtcaacaacgggaggcggtatgagcggcgctcgattacacacgctgctgcctgaattaaccacgcgtcagagcgtgatggtcgtcggcgcggcggtcattgacgtgatcgccgacgcttatgccctcccctggcgtgggtgcgatatcgaactgaaacagcagagcgttaacgttggcggctgcgcactgaatattgccgtggcgttaaagcgcctcggcatcgaagcgggtaatgccttgccgctcggtcagggcgtgtgggcggagatgattcgcaaccggatggcaaaagagggcttaatcagcctgatcgataacgccgaaggtgataacggctggtgtctggcgctggttgagccggatggcgaacgcacttttatgagtttcagcggtgttgaaaatcagtggaatcgccagtggctggcgcgattaaccgttgcgcctggcagcctgctctatttttccggttatcaactggccagcccctgcggcgaattgttagtggaatggctggaagagctgcaagacgtgacgccgtttatcgattttggcccacgtattggcgatatcccggatgcattactggcgcggatcatggcctgtcgacctttagtgagcctcaatcgtcaagaggctgagattgccgccgaacgttttgctttatccgcagagataacaacacttggcaagcaatggcaggagaaatttgccgcgccgttgatcgttcgtctcgataaagaaggcgcatggtatttcagcaacgacgcttctggctgcattccggcatttccaacgcaagttgtcgacaccattggggcgggcgacagtcatgccggtggcgtacttgccgggctggcctctggtctgccactggcggatgccgtattactgggcaatgcagtggcgagctgggttgtcgggcatcggggcggtgattgtgcgccaacgcgcgaggaactactcctcgcacacaaaaacgtataattactcctcgcacacaaaaacgtatagatcgctgcgacagtggctaatgctgtactcaataggccgttgctgttggtcaagcgccacttgcttgatcaccagcaccggtattttgctatctaactgaatatgactctgaaactcggcatccggcatccgggcgctaacgcgggaacgcgtacgttgtgggtaaatgtgctggctgcggaaatagtcataaagactaatcccgatggcatcaacatcatgaattaaatgcgccggaacccagctttcctcaatgcttaccgcttcttcatcgacatagcgaatacgcttaagcaaaaagacatcacttcctgcttcgaccgccagctgctgcgcgacttcttcgggacatttcacgacacgcttgttaacccatagcgtatcgggctttttcccgcgcaataccacctgctgagaaaaacctcgcgcttctttcaagctgtattcgaagatgttgttgatctgcgtgccgtaaccgcggctacgcgtcaccacaccctcttcttccagcgcctgcatcgccttgcgcaccgtaatgcggctaacgccggttaactgacttaaatcacgttcaccgggcaaaatattgccatgctccagcaccccgctgcgcacggcattttttaccgtttcggcaaacttaatataaagcggcgtgttatccgccgctaaaatacgctcgttcagttgggcaatcagctgggtatgcgcttgttccatttgtctttttcctgccggggagtctggtgggagtatatcactgcttcttatttaaggcgtttctttaatcccatcaacgaatgcctgcaactcctccaccgtgccattaaatacattaaaatccaccggaccattgatgccatctacctgtccacggtcggaatgctgccagaagcgccaggccattccgtcattgtccggacgacgttgatagtagtgagccacccaccacggatattcattgaaatagcccgccagattggtgtgataaaaaacggctccactgtaaataatcggctttttccccgtacttttttcgaccatttttagccactgacttacccgcttgcgtaattcttttgcgcttaattttccccgttcttctacgtccagcacggcagggaaatcgccttgactgaaatccaccgtttgcagaaataatctcgcctgaacactagcggatacgctcggggagaaataatgatacgccccacgcagcaggccattttcgcggcttagttgccagttacggctaaaataggggtccaccagcttttcgccttccgtcgccttaataaaagcaaactgtaagcggataccattgtcgcgcatttttgccacccgctgccagtcgatccgctcctgccagcggctaacatctattccgtgaatggtgtaactggcaggaatgcgaatagcgaaagatttaaccgggcgataaccgtagaagtggatgtagtctgtaatctgaactgctgtgctatagaaaaaattcaccgtctgacgcggataaattgcaacgatggaaattagcccaagagcgcataatagagaggtgagtttttttcgactggtaattcttagctgcattggtttcatccctgaatgtcagtgccaaaggctgacaataaccaaagcagctatagtacggtgctcaccaccaggcgtggaagtggtgaaccggaccaataccgtgaccaacttccagcgtgtcggcctgggctaacgcgctactaagccagctttttgcctcctgtacggtgtcagcccagtttgtatggcgcgggcgtagtgcagccaacgccgcagagagtgtacaaccagtgccgtgggtgtttttggtcataatgcgcggtgcggtaaaccgttgttcaccctcgcgggtaaacagccagtccgggctttgctcatcatccagatgaccacctttcattagcactgcgccacagcccatcgccaacaggcttcgcccttgttccagcatttcctgttcggtgcgcgcgtgtggcgcgtcgagcaaggcggcagcttcgggcaagtttggcgttattaaactaacctgtggcaataatcgactgcgcagcgtagcaaccgcgctaggactaagcagcgggtcgccgctttttgccagcataacggtgtcgagtaccacgttttggatctgataacgttgcaaccgttctgccaccgcttcaacaatatcggtttccgccagcataccgattttagtggtatcgattcgcacatcgctgaacacgctatcgagctgggcggcgacaaaatcaggctcaatgcgatacacgctctgtacgccacgggtattttgcgccaccagtgcagtaataacactgcaaccataagcgccaagtgcgctgaaggttttaagatcggcctgaatccccgcaccaccactcggatcagtaccggcaatcgtcagagcgttaattcgtttcatgcctgcacctcctgcgtcaattgccagagcgcatcaaggaaatgtggaacaaaactgcctggcccctcgcttctggcgactgcgcgttctccggcttgtttcatccagtgacaggcagatgcgacattttccagcgtatcgcctggtaacgcacagcaggcagcgacaaccgcgcttaatgcacagccagttcctaccactttggtcattaacggatcaccaccgtgaataccaatgatacgatgtccatcggtaacataatccatctcgccagtgaccacgacgattgcgccagtttcccgtgccagtgtttgtgcagcgggtatcgcgttagctgcggcgtcagtggtatccactccccgtccgccattagcaatgccagctaatgccatgatttcgctagcattaccacgtatcgctgccggtttaaaagataaaagttcatgacaaaaatggcggcgataatcgagcgcacccaccgctactggatcaagcgtccagggtgtttgagagctttttgcttgctcaacggcagcacgcatcgcctgagcgcgtggctgcgtcagtgtgccaacgttaatcaacaaggcactggcgatagccgcaaactgactggcctcttcggtttcgataaccatcgctgggcttgcaccgagcgccagcaaggtattggcggtaaaggtttgcaccacatcattggtcatgcagtgcacaagaggggaatgttggtgaaaaaggtgtaacgcgtgcgcagattgcgcactacccagcaggtcgacttgcatagtttgctcctgccataacgtgaagaagcaatgacctggtggtccgtgacttccctacgctggcattatccagatcaggtgatacgggtatttctcagccttcacgcagaagggcaccccgagtcgtttggttgcgatgataaatcgcagaggaggatggtaatgtccagcgcacgcgttgtaaacgaggaaaaacggcagttttacaatcgcgttaataaattatttgatataactatccagcaccttcagaacgacatccagatcttcttcacgttttagctcatccccctggtgaacgatgtgttccgtcagatgacctttaatcacttcccgcatcagaccgtttaccgcgccacggatagcagcaatctgttgtaaaactgcagcgcattcgtgcggctcgtcgagcattttcttgagcgccacgacctggccctgaatcttactggcacgcgctttcagtttctgtttatcacggattgtatgagacatggcaacacctggttaacaagaatatgaaaaatcatagcactattaatctactggggggtagtatcaggtactgggggggagtagaatcagattgccgaattaatactaagaattattatcatgaccgaatttacaactcttcttcagcaaggaaacgcctggttcttcatccccagcgccatcttacttggtgcgcttcatggcctggaaccagggcacagtaaaacgatgatggcggcgtttatcatcgccatcaaaggcaccattaaacaagcggtgatgctcggactggcagcaactattagccataccgcagtggtctggttaattgcctttggcgggatggtgatcagcaagcgctttactgctcaaagtgcagaaccgtggctccagctgatttccgcagtgatcattattagcaccgcgttctggatgttctggcgtacctggcgcggcgaacgcaactggctggagaatatgcacgggcatgattatgagcatcatcatcacgatcacgaacatcaccacgaccatggacatcatcaccatcacgaacatggcgagtatcaggatgcccatgcacgagcccatgccaatgacattaaacgacgctttgatggtagagaggtcaccaactggcaaattttgttatttggcttaaccggtggccttatcccctgcccggcagcaattaccgtgctgttgatatgcattcagttgaaagccctgacactgggcgcaacactggtcgtcagtttcagcattggcctggcgttaacgcttgtcaccgtaggcgttggcgcagcaatcagcgttcagcaggtcgcaaaacgctggagcggatttaacactctcgctaaacgcgccccctatttttccagtctgttgattggcttagtcggtgtgtatatgggcgtacatggcttcatgggcataatgcgataactcaatcctttaggcttgcatgttatcttcagcccaggatgattcttaaatcagctatttccgctgactctctgctcgctaaggatgcttttagggcatcctttcatttacactttttacgaaatcatgggatcactaacaaaatatcgcttgtcagttatattgtatggcaggaaagatatgcgactgatattacagatccccaaagtggagagtttatgaccattaaaaataagatgttgctgggtgcgcttttgctggttaccagtgccgcctgggccgcaccagccaccgcgggtagcaccaataccagcggaatttctaagtatgagttaagtagtttcattgctgactttaagcatttcaaaccaggggacaccgtaccagaaatgtaccgtaccgatgagtacaacattaagcagtggcagttgcgtaacctgcccgcgcctgatgccgggacgcactggacctatatgggtggcgcgtacgtgttgatcagcgacaccgacggtaaaatcattaaagcctacgacggtgagattttttatcatcgctaaaaaaagccccctcatcatgagggggaaatgcagacaccttgttattttttattattagccacttgctcgtcttgcttgttattagtcgtatttcacgttgattaatgcggttgcctccagtgcgccagatttaactttgtttgtatcgtagacgtagtaactggctgttatcggaatactaaccgttgtatctgtaagtttactcttcgccgcaacttcctttaaatttgtatatcctttactgctgttagtgatatttaaaagtgtgactgggctaccattactttcaagaataaatcctacgccattatcttccgcacctttcagtattgtgttgctgttggttaacaagtcagaactacttaaatacacctgcattttccgacttgtttgattttgttgacctaataaatttttacaacgcagaataatatccccttgtttactatttattgttgctttgttacctgtggctggtaattgactaacgggaatactgtctaaagtaattaataaatcgtccggtttgcaggttgtggttatcgggttgtaactcaatgtcagattaaaggaatagacacctgcattttgtgccaatgcatttctgtagctatttacacatgcatcccaactcttgccacctaataaacacagtagaaattgtactgcggcactcccgcgtgtgctactactagcactggataatgtcgcaacaccattaatcatcacactaccgccgccccccgcagaaacattcacttttgcattactggccgcaggtgtcaccgtaacactataaccactggtgaaactggtctgattattactcaacgtgatgttgtttttattggtccattcaaaatgtaaatttaattttatggtatcgttataaagtccaacaataatatcgctcgggctcataggggtgatagtatttgtacttacgcaactgctatcattaaaattatgctcatatgtcgccatttgtgtttgagtaagtgcaaaatccccctgaacaaccaagttgtgctgaacagataactcactataacatgccgcatagctcacaggcataaccatcatcattaatataaatagcattatgcgaatttccatagaaccacctgactattactggcaaatataatttctactttcatcaatctctttaccgaaggtgattgtgcaactaagtccttgttgcttatcaattgccacattaacgcttggcggtacttcattggtgcgaataaataactgacttccctggccgacaacgccaatattatgaccatggatatcattgacttcataaccaaacgttaaactttgcccatctgctcttaacgcttttataaaccatggcttgcgctgatcggtatcaaaattaaccagtacaaccgcgccgcgataaggggcggcaattttccggttgccacgtaattctgcttcgctatcgctttggctcacatccagcatcaggtgattttcccgataaggtgtcattccgtcgtatatcaccactccattacggtttgttgtgcgatatttttgcccattgacataagcatctttaattcctggcgcattcatcacagcaaacgtttcggaaagacggttcgccagattaacgccaccgctccaggcgacaatgcccccactaacactggctccagcctgtcgataagtactgctctgactataactgccattcactgtcgcaaccggcgcgttccaggtcaaattcgccccagctgtcgtttcatttccctgatgttgatgactcaggttgacaccataattgaactgatcccgactccctactgttccacttaatcccgtattattactggcaaacccctgatcatcaaacgtcgtactgttagacatatatatttgccgacgaggcgtgctaacgtcatcaccccaatcaaagggaatgcttataaaaatattaaaacgtttctcttcatgatgattctcgtcataagcctggcttgccgcgagggtatagcttatccgtcgcaggttgttggaataactcaactgataatccttactactgccgctacgcccccagtaatctcgccataacgtacttaaactcacagacccccaaccttctggcaaactctggctcatattggcggaaaagctatttttgcggccaaaatcgttctggtaataatcggcaatgtcatagacatcgttttcatcacggcgataattatctttattgtttgcccaaacgtgatcgttaaatgtccggtaatcacggctgctataacgccaggccgccagaccaaaacgcgtgctcgtttggctcacaaatttgttgtaggcaatttgataactttgcccgtcaaacacatcgccgttgtcttgtttactatggctcttagtggcatcgacggaaatggcaccaatgcgtgtattccagccagcccccaaagtaaacgcgtaataattattcgcgaccatgctgccaccatacagcgtcaataaattattaaaaccatactgataacccgcctggacaaaatcactttgtttgctcgccccttcaatatggctacgacccgccgctaaatcatatttgctcacgccgggttgcagcatatttggcaccgctgcataaggcaccagataggtggttacgctgccgtccgcctctttcacgctgacatcaagatctgctccaccaccggccaactgcaaatctgtaatcgcgaacgggccaggaggaacctctttctgataaaccacaaaaccattctgttcaatagttaccagcgcgttactctgagcaatcccctgcacccgtggcgtaaaattttgtttgctgttaggcaacatctgcatatcacgaaacaaccgcacacctctgaagcgaacagaatcaaaaatatcgctacttgtgtacatatcacccacgcgaagcgtgccgagaagttgggcaaatccacgttccagatacagggtattgcttttccacacccctggattgttatttgttttactgaaactggcatcagaatgcagttgccaccccagtaaatttaacccgctgttaaaacgtacatatgtactcttgttattaccgctcgctttatagtcgctgtaatactgactcagataataagaggtataaaacgcattaataccccgctcccagttttccggtggaacatagccactttccagttcttccacccaggcctgcgggacactgaaatcgagacgaaaaaccccgatatcccaggtatagctcccaccctgaacaagttgctcaaatgttaaacattgcttaccgctggcgaagttatcgctattaatgcctaaccgcttgataacttctctacttaaacatgtttcttgcgggttgtctttaacaataatctcatatttcccgcgccattgcttattgacataaatatcgatgtcatactgccccggtaagggttgattatcatcaagacgaatatttgcaacctgctggtctttcattccacctatcataaaatgggtatcaaaggtttcttcagctgcataagcttcaatgccgagcaataacgctacgattgcacttgcaagtggggtcattctcaacataggcagctcctgcaattaaattttgtcactaatatagttgccatggtcatcgataatggtcagatgccagttatttgcattattacttttgacattaacactctgactttctaagggggcaatcataatagtttcataattgactttgacattattagctttgacatcgctaatcgtcacccaattagcactgtcattttttatcaccaaaccattgccactgcgatttaccagcaattttttaaatgtcgctttatttaccggagcaatacccgctggccggtaaaacaacttaattctgttttgcatcgcaaacttcagtgcattcttaccttcttgctctggactatttggtggaatatccagaacattcagataaaaaatgctttctttattagtgggcagtttattcggcataattttgatttttacttgctgcccggaatttgcccctatttttgccactggtggcgttaacatgaaaggaacctgaattttttctggtggtaaactcgtatcgccatcatcaatccacgcctgcagcaggctagaacggtttccctggttcatcaactgcaccatcacttctttattttctgccgggtaaataatgcgcgtcccgtagataacaattccggcatgtgcaggaaggaccatagaaaaaatgagtaaagataataatcctttcattttaatgcctcttaaattaaaaggccgccatgggatagcggccatgtttattacctggagaaacttacaattttatttattaatcctgcgccacacgcataaccagagaagataacacatcaccactttgcacactgttatctgtcagtttcaggtattttgctttaaacggaatagcatattgaccttccgctgttttataactctcaatgttaaaaggtgcagaaacatccaggacatcgctgttatcacctaaatagagatagtaacccacggtatcgttgctactggctatcgccttatcgttaccggttattttatcgttggtaatcaagctgagttttacaccagcaacttctttcgggcagctaatttttaacatgctgctggttacaccgactgcatcatcataggtagaatatttagctttaccttcaaagacactggttggtacagtcggcatattaatacttacactatcaccacccgcttcgaatttacacggagattctgcaatattccccttaatagttaatgttccggtatcaacgtctgcagcaaatactccagcgctcataaaaaaagaagaaaagacagcggcagcaataatactacgtttcataatatgttccttaataaaatttatttttggttgttaagagtctgtatctcttggaaacaaatttctcacatcaaaaaagttgccgcaatgtaaacacattgttttattgatttaaaacaaattaaccattgcaatataaatacaaaaaatatttaagagtattaactatttatcgcatctatcaattaatgtagatttatgtaaatggtattgttgatatcaataaaaaagccgaaatcatttatataaatgatttcggctttctaaatgcaattaaaatcaggttgccaaattaatcgtagcgatttaacacgattcgacgtttgctatcgctacctgcaacaaccacttctgtcgttacacctttgacggggctagaaaacagatgacgggtgtcaacattatacgttaactgaccacaatgctgttgaggttgaccattaaccatagccatactgcatgttgggggactgatcctgccattaatcgctaatgtggcagtctcactagagaatgcgggagaagccaatccataggcaagaaaaataattccactcagccaatacttattcattgaacgttatccctgtagtaaaggttatgcctggatagaatgagtgcataacaaactatagctgtacatccactacacagccacgaaggatgataatgaagcattgcctgtatgatcaatcgactttgtagagtttcggacgaaggtccgcagaatattcgcagtattaaataagtgttcattaatgcggcaaaaactaatacaccgcatcaatgtaacatctctgcggtgtatgaagaataaccagaatggttaataggcgttagaccgcgcggaaggaaatctcgcctggaatgacttcaccctgccagtagagctgagctgcaacgcggtcagccagctggcggtagatagcggtaaattcgctctccggacggctgataaccgttggcgtacctttatcgagatcctcacgtaaggagatgtgtaacggcatctgccccagcagctgtgtatggtatttttcagccagtttctctgcaccaccggtaccgaaaatcggttcatggtgaccacagttactgcaaatatgcacactcatgttctcgacaataccgagcaccggaacctcgactttctcgaacatcacaatgccttttttcgcatcgatcagcgcgatgtcctgcggggtggtgaccacgactgcaccggttactggaatgttttgcgccagcgtcaattgaatgtcaccggtgcctggcggcatatcaagcaccagatagtcgagatccggccacaaggtttcctgcaacatctgcattaacgccttgctcgccatcggtccacgccacaccatcgcattgtcgtcagtgaccagataaccaatactattggttgccaggccatgagacataatcggtgccatatgggtaccgtccgggctagttggacgctgattttctgcgcccaacattgttgggatacttgggccgtagatatcggcgtccagaatgccgactttcgccccttctgccgccagcgccagtgccaggtttaccgccgtggagcttttacccacgccgcctttaccggaactcaccgcgataatgttcttcacaccgttaattcccggctgattcttcacgcgtttcagagtggctatgttatggctcagtttccagtcgatagctttcgccccggtgatgcgcagcagttcggcgctacattgctcttttaactcttcgaacgcgctatgccagacaaacggcataaccagttccacatgcaacgtgtcgtccatccaggcgacatggtgcaacgctttcagcgtggtgaggttatgcttcagggttgggtgctgaaaattggccagtgtcccggcgaccattgcgcgcaaggcttctggacttttggcctgggattgttcgttcatcccgactccttttttgtatagataaaccatcagctgatagtttacctgaagaatatagagaagtacttacttaacattttcccatttggtactatctaaccccttttcactattaagaagtaatgcctactatgactcaagtcgcgaagaaaattctggtgacgtgcgcactgccgtacgctaacggcagtatccacctcggccatatgctggagcacatccaggctgatgtctgggtccgttaccagcgaatgcgcggccacgaggtcaacttcatctgcgccgacgatgcccacggtacaccgatcatgctgaaagctcagcagcttggtatcaccccggagcagatgattggcgaaatgagtcaggagcatcagactgatttcgcaggctttaacatcagctatgacaactatcacagcacgcacagcgaagagaaccgccagttgagtgaacttatctactctcgcctgaaagaaaacggttttattaaaaaccgcaccatctctcagctgtacgatccggaaaaaggcatgttcctgccggaccgttttgtgaaaggcacctgcccgaaatgtaaatccccggatcaatacggcgataactgcgaagtctgcggcgcgacctacagcccgactgaactgatcgagccgaaaagcgtggtttctggcgctacgccggtaatgcgtgattctgaacacttcttctttgatctgccctctttcagcgaaatgttgcaggcatggacccgcagcggtgcgttgcaggagcaggtggcaaataaaatgcaggagtggtttgaatctggcctgcaacagtgggatatctcccgcgacgccccttacttcggttttgaaattccgaacgcgccgggcaaatatttctacgtctggctggacgcaccgattggctacatgggttctttcaagaatctgtgcgacaagcgcggcgacagcgtaagcttcgatgaatactggaagaaagactccaccgccgagctgtaccacttcatcggtaaagatattgtttacttccacagcctgttctggcctgccatgctggaaggcagcaacttccgcaagccgtccaacctgtttgttcatggctatgtgacggtgaacggcgcaaagatgtccaagtctcgcggcacctttattaaagccagcacctggctgaatcattttgacgcagacagcctgcgttactactacactgcgaaactctctagccgcattgatgatatcgatctcaacctggaagatttcgttcagcgtgtgaatgccgatatcgttaacaaagtggttaacctggcctcccgtaatgcgggctttatcaacaagcgttttgacggcgtgctggcaagcgaactggctgacccgcagttgtacaaaaccttcactgatgccgctgaagtgattggtgaagcgtgggaaagccgtgaatttggtaaagccgtgcgcgaaatcatggcgctggctgatctggctaaccgctatgtcgatgaacaggctccgtgggtggtggcgaaacaggaaggccgcgatgccgacctgcaggcaatttgcagtatgggcatcaacctgttccgcgtgctgatgacttacctgaagccggtactgccgaaactgaccgagcgtgcagaagcattcctcaatacggaactgacctgggatggtatccagcaaccgctgctgggccacaaagtgaatccgttcaaggcgctgtataaccgcatcgatatgaggcaggttgaagcactggtggaagcctctaaagaagaagtaaaagccgctgccgcgccggtaactggcccgctggcagatgatccgattcaggaaaccatcacctttgacgacttcgctaaagttgacctgcgcgtggcgctgattgaaaacgcagagtttgttgaaggttctgacaaactgctgcgcctgacgctggatctcggcggtgaaaaacgcaatgtcttctccggtattcgttctgcttacccggatccgcaggcactgattggtcgtcacaccattatggtggctaacctggcaccacgtaaaatgcgcttcggtatctctgaaggcatggtgatggctgccggtcctggcgggaaagatattttcctgctaagcccggatgccggtgctaaaccgggtcatcaggtgaaataatcccccttcaaggcgctgcatcgacagcgccttttctttataaattcctaaagttgttttcttgcgattttgtctctctctaacccgcataaatactggtagcatctgcattcaactggataaaattacagggatgcagaatgagacactttatctatcaggacgaaaaatcacataaattcagggcagttgagcaacagggaaacgagttgcatatcagttggggaaaagttggcaccaaagggcaaagccagataaaaagtttttcagatgctgcggcagcggcaaaagcggagcttaagctgattgcggagaaggtgaagaaggggtatgtggagcaagcgaaggataattctttgcaaccttcccaaacggtaacgggctctctcaaggtagcggacttatccaccattattcaggaacaaccctctttcgtagcagaaacccgtgcgcctgacaaaaatacagatgctgttttaccgtggctggcgaaagatattgctgtcgtttttccgcccgaagttgtacacaccacgttaagtcatcgccgctttcccggagttcctgttcagcaagcagacaaattgccccaattacgtcgcttagcctgtagtgtgtcgcaacgggataataaaacagccacatttgacttcagcgcctgttctttagaatggcaaaacaccgtcgcccaggcgatcagtcagatcgacggcctgaaaacaacacagttaccatcaccagtaatggctgtactcacggcacttgaaatgaaatgcacaagatataaagtgcgtgaggatgttatggatcagatcgtccaggaaggcggtctggaatatgctactgatgtaataatacaccttcaacagattgatattgaatgggattatgcgaataatgtcattattattctgccgtctggcattgcacctagctacttggagcaatattccagatttgaatgacgcctacgtaaacatttatcactgacggaagagtctctctggcaaaaatgtgcacaaaaacttattgccgcaattccacatattccagaatggcggcaaccattaattgctttgttattacccgaaaaaccagaaattgcacatgaaattgcccagcgtctactggggcaaaaaaaattaccctcgcttgagtggttaaaaatagtggcgactgatgagcacattcttgcctcattagaaaaatatcacgaaccatatgccatttttgatgattactattgtggtgcgatatggtcagccaccgtattacaggagcaaggtgttgcagccctgccccgatttgctccctatgccgcaagtgactactgcgccgatgtgttgcgtcatatcaatcatccgttcgcattgacactgcttatacgtgtagccgggcaaactaaacgctgtcacgatcggatgacgaaagccattgctgcgttcccacatgcagcaatggcggcactgacggaacttcttgggcaaaaagaagagaacagttggcgcattatgctaatgacaatgcttatctcacaaccagcactggcagaacaggtcattccctggctctcgacacccgcagttgccgtactgaaatcatgccagcaacaactgacacagccctcaaaccatgccagcgccgatctactgccagccgtagtagtctcccctccctggctttcgaaaaagaaaaaatcgccgattccggtgctggatttagcgccattaggcattgagccaatctgttatctgacagaagaaatcagtaatcaacttttggcgaaatatatctggtattcaaaacacatcacggttagccatgaagaaagtactaccaacctgttggcaaggatgggttttcaacgacggatcgctggtacatatattaaagctcccgaagcggtagttgaggcatggctaaatgaagattattcaaccttactaagtgaatttaaggtgtttcattcacctaccgggcattattggcagttggggattttgacaacattgccgctggagaaagcagtaaaagcatggaatgcccttaccctatctccacataccgataccgaatactccatgttacattttggactcaaagggttacctgggttagtaaactcacttgcacgctatccacaagaagccttgcccatcacgaattacttcgcagcgagtgagctggctcctgccgtcgcccgtgccttcaacaaactgaaaacgctacgcgaaaacgcccgtagctggctgttgaaatacccggaacatgcccttaccggcctgctgcctgcggcgctcggcaaagccggtgaagcacaggataacgcccgcgctgccttgcgtatgcttaccgaaaacggtcatcagccattactgcaagaaatcgcccgacgttataaccagccggaagtaaccgatgcggtgaacgctctgcttgcgctcgatcccttagataatcacccgacaaaaatccccactcttccggccttttatcagccatcgctctggacgcgcccggtattaaaagcaaatgcccaatcactgccagatagcgccctcctccacctcggtgaaatgctccgcttccctcaggaagaggctctgtatccgggattattgcaggtgaaagacgtctgttccgccgactcactggcgggatttgcctgggatctgtttaccgcctggcagaccgctggcgcgccgtcgaaagagagttgggcgttcactgcgttaggcgttctcggtaacgatgacaccgcccgcaaactgacgccattaatacgcgcctggcctggtgaatcccagcataaacgcgccaccgttgggttggatattctcgctgctatcggtagtgatatcgcccttatgcagcttaacggcatcgcccagaaactgaaattcaaagcattacaggagcgggcaaaagaaaaaattgccgacattgccgagagccgcgaactcacggtggcggagcttgaagatcgggttagcaccggatctcggtctggatgataacggttcgctgctgctggattttggcccacggcagttcaccgtcagctttgatgaaaccttaaaaccgtttgtgcgtgatgtttccggcagccgcctgaaagacctgcccaaaccgaacaaaagcgatgatgaaacgcgggcgaacgatgcggttaaccgctacaaattgctgaaaaaagatgcgcgtaccatcgccgcccagcaggtagcaaggctggaatccgccatgtgcctgcgccgccgctggtcgctggaaaacttccagctcttcctggttgagcatccgctggttcgtcacttaacccgccgtctgatttggggcgtttatagcgccgaaaaccagctactggcttgctttcgcgtagcagaagataacagctccagcaccgctgacgatgatcttttcaccctgccggaaggcgatatctctatcggcactcctcacgttctggaaatatcaccaacggatgctgccgcctttggtcagctttttgccgactacgaactgctaccaccgttccgccagctcgaccgtaacagctacgccctgacagaagccgagcgcaatgccagtgaactgacccgctgggcaggcagaaaatgcccgagtggtcgggtcatggggctggcgaataaaggctggataaagggcgaaccacaggatggaggctggatcggatggatgatcaaacctttgggtcgctggtcgttaatcatggaaatcgatgaaggctttgcggtaggcatgtcgccagccgaactcagcgctgagcagctcttaagcaagctgtggctatgggaaggcaaagcagaaagatatggctgggggagtaattcaacacaggaagcgcagttctccgtaatcgatgccatcaccgccagcgagctaattaacgatattgaagccctgtttgaataaggaaagagcatggacaaggaattaccgtggctggcggataacgcccaactggaactgaaatataaaaaaggcaaaacgccgctcagtcatcgtcgctggccgggcgaaccagtgtccgttatcactggaagtctcatccagacattgggtgatgaattgctacaaaaagctgagaagaaaaaaaacattgtctggcgttatgagaattttagtctggagtggcagtccgccatcacgcaggccatcaacttgatcggcgaacacaaacccagtatcccggcccggacaatggcggcgctagcctgtatcgcgcaaaatgacagccaacagttgctcgacgaaatcgtccaacaagaggggctggaatatgcgactgaggtggtgattgcacgccagtttattgcgcggtgttatgagagtgatcctctggtagtgacattgcagtatcaggacgaggattatggctatggttatcgcagtgaaacctataacgaattcgatctccgactgcgtaagcatctctctctggcagaggaaagctgctggcagcgttgcgccgacaaactcattgccgcactaccaggaataaacaaagttcgccgcccttttattgcgctgatcctcccggaaaaaccagaaatagccaatgagttggtaggccttgaatgcccgcgaactcattttcattctaaggagtggttaaaagttgttgctaatgaccccacagcggtgagaaaactcgaacactactggagccaggatatatttagcgatcgagaagccagctacatgagccatgaaaaccacttcggctacgcggcctgcgccgcccttttgcgcgaacaaggactggcagccattccgcgcctcgcgatgtatgcccataaagaagattgcggcagtctgctggtacaaattaaccatccgcaagtcatccgcaccttgctactggtggctgataaaaacaaacccagcctgcaacgtgtagctaaataccataaaaacttcccccatgcgacgctcgccgcactggcagaactgctggcgttaacagaaccaccagcccgccctggttatccaatcatcgaagacaaaaagctgcctgcacagcaaaaagcacgcgatgaatactggcgtacgctgttacaaacgctgatggcaagccagccacaactggcagcagaagtgatgccgtggttaagtactcaaccccagagtgtgctgaagagttatttaagcgcaccgcccaaaccggttattgatggcaccgataacagcaatctgccagaaatcctcgttagtccaccgtggcgtagtaagaaaaaaatgacagctccacgtcttgatttggcaccgctcgaattaactccgcaagtttactggcaaccaggcgaacaagagaggcttgccgccactgagcctgcccgttatttcagcacggaatctcttgcgcaacgcatggaacaaaaaagtggacgagttgtattacaggaactgggttttggggatgatgtatggctgtttctgaattatatactccccggaaaactggatgctgcacgcaatagtctctttgttcagtggcattactaccaggggcgggttgaagagatcctgaatggctggaactccccggaagcacaattagcagaacaggcgctccgcagcggtcacatagaagcgttaattaacatatgggaaaatgacaactacagtcattatcgtccggaaaagagtgtctggaacctgtatttattggcacagttgccgcgtgagatggctttgaccttctggctgcgtatcaatgagaaaaagcatctgttcgcgggtgaggactattttctcagtatcctcggattggatgcgctaccaggtctgctgttggcttttagtcatcgtccaaaagaaacatttccgttaattttaaattttggcgcaacagaactggcgctgcctgttgcccacgtctggcgacgtttcgcggcgcagcgtgatctggctcgccagtggattttacaatggccggaacatacggctagtgcacttatccctcttgtctttaccaaacccagcgataatagcgaagccgcattacttgccctgcgtttactgtacgaacagggacatggcgaattgctacaaaccgtggcaaaccgctggcagcgtacagatgtatggtctgccctggagcagttgcttaaacagggtccaatggacatttacccggcacgcattccaaaagcccctgatttctggcatccgcaaatgtggtccaggccgcgccttatcactaataatcaaactgttaccaatgacgctctggaaattatcggcgaaatgctgcgctttacccaggggggacgtttttatagcgggctggaacaactgaaaacgttctgccagccacaaacgctggcagcttttgcctgggatctcttcactgcgtggcaacaagctggtgcccccgcaaaagacaactgggcatttctggcgttaagtctctttggtgacgaaagcacggcacgggatctgacgacacagatcctcgcctggccacaagaaggcaaatctgcccgtgctgtcagcggcctgaacatccttaccctgatgaataatgatatggcgctgatacagctgcatcatataagccaacgggctaaatcccgccccttacgtgataacgcggcggaatttcttcaggtggtcgcagaaaatcgcgggctaagccaggaagagctagcggacagattagtcccaaccctgggccttgatgatccgcaggcgttgagttttgattttggtccccggcagtttaccgttcgcttcgatgaaaatctcaacccggttatctttgatcagcaaaacgttcgccagaaaagcgttccccgtttgcgcgccgatgacgatcaactgaaagcgcccgaggcactggcccgactaaaagggctaaaaaaagatgctactcaggtgagcaaaaacctgctcccgcgtcttgaaacggccctacgtaccacccgacgctggagcctggcagattttcattctctgtttgttaatcatccctttacccgtctggttacccagcgattaatatggggggtttatccggcaaatgaaccgcgttgtttactcaaagcctttcgtgtggccgcagagggggagttctgcaatgcgcaagatgagccaattgacctgcctgcggacgctctgattggcattgcccacccgttagaaatgacagcagaaatgcgcagtgaatttgcacagctttttgccgattacgaaattatgccgccttttcgccagttgagccgccgcacggtgctgctcacacctgacgagagtaccagtaacagcctgactcgctgggaaggtaaatccgctaccgttgggcaacttatgggaatgcgatacaaaggctgggagagtggctatgaggacgcatttgtctataacctgggtgagtaccggctggtccttaagtttagtcccggttttaaccactacaatgttgatagcaaagcgctaatgagcttccgttctcttcgagtgtaccgtgacaataaatccgtcacttttgccgaacttgatgtgtttgatttgagtgaggcgttaagcgcacctgacgtcattttccattaaaacacagcgggcagtgatgcaactgcccgttatcaacacgacttaccagcggggaaagcgatgatcgtgcaaaaagagctggttgctatttacgattatgaggtccctgtacctgaagatccgttttccttcagacttgagatccataaatgctctgaattatttacaggttccgtctatcgactggagcgattccggctacgtccaacatttcatcaacgtgatcgagaagatgctgacccgctaataaatgatgcgttgatttatataagagatgagtgtattgatgagcggaaattacgaggtgaaagtcctgaaactgtaatagcaatttttaatcgtgaactacagaatatattcaaccaagaaatagaataatatactctaaataattcaaattggtccgatccggcgcaacgtcccaatggcctggattataaatctcattatcttaattgcaacggggtccagccgtggttataattcgttcgttggaacacgatgttgcacaggctgtggtgttaggcctgaaaatagtaaataaaagaacctgcctcaccagcaggtttttttatttactgtgatctgctttccagatatttttcgctcaaacaactaatgcgccaaacatttattgcgcgtaaaatatcgtttatttcattaatacatttcagggatgaatatatgagtccgcagaataatcatctgcagcgtccgcctgctgctgtgttatacgccgatgaactggcaaaattaaaacaaaatgataacgcaccttgcccgcccggttggcagttaagtttgcctgcggcccgtgcttttatccttggcgacgaagcgcaaaatatcagccgtaaagtggtgattagcccctccgctgtcgaacgtatgttagtcactcttgctaccggccgcggtttgatgttggtgggggaaccgggtaccgcaaaatctcttctttctgaattactggcaaccgctattagcggcgatgccgggttaaccatccagggcggggcatctaccaccgaagatcaaatcaagtatggctggaactacgccctgcttatcaatcatggtccgagtacggaagcgctggtccctgccccgctttatcagggaatgcgcgacggcaaaatcgtccgtttcgaagagataacgcgtacaccgctggaagtgcaggactgtctgttaggtatgctttctgacagggtgatgacggggccggaactcactggtgaagccagtcagctctatgcgcgagaaggctttaatattattgccactgccaatacccgcgatcgcggcgtcaatgaaatgagtgctgcgctaaagcgtcgcttcgattttgaaacggtttttccgattatggatttcgcccaggagttggaactggtcgccagtgctagcgcgcgtttgctggcccatagcggtattccgcataaagtgcctgacgcggtactggaattactggtccgcaccttccgcgatctgcgtgccaacggcgaaaagaaaacgagtatggatacactgacagcgattatgtccaccgctgaagccgtgaacgtggcccatgctgtgggcgtccgcgcctggtttttagcgaatcgcgcgggggagcctgccgacctggtggaatgtattgccggaaccatcgtcaaagataacgaagaagatcgcgcgcgtctgcgccgttacttcgaacagcgtgtcgccacacataaagaagctcactggcaggcttattatcaagcccgccaccgcctgccgtgaggaaagatgcatgagcgagccgttaattgtcggcatccggcatcatagtccggcctgcgcccggctggtgaaaagcttaatcgaaagccagcggccacgatacgtgttgattgaaggcccggctgattttaatgaccgggtagacgaactgtttttagcccaccagcttccggtagctatttacagttattgccagtatcaggacggtgcagcccccgggcgtggtgcctggacgccatttgctgaatttagcccggagtggcaggcgctacaagccgcacgtcgcattcaggcacaaacttacttcatcgatttgccttgctgggcgcagagtgaagaagaggacgatagccctgatacgcaagatgaaagccaggccttactgctgcgtgccacccgcatggataacagcgataccctgtgggatcacttgttcgaagatgaaagccagcaaactgcattaccctctgcgctggcgcactattttgcccaactgcggggcgacgcctccggcgatgcgctcaatcgtcagcgcgaagcctttatggcccgctggattggatgggcgatgcagcaaaataatggcgacgtgttagttgtctgcggtggctggcacgctccggcactggcaaagatgtggcgcgaatgccctcagaaaattaacaagccagaattgcccagcctggcagatgccgttacaggttgttatctcacaccctacagtgaaaagcgccttgatgtgctggcaggataccttagtggaatgcctgccccggtatggcaaaactggtgctggcagtggggcttgcagaaggccggtgaacaactgctaaaaactatccttacccgtttgcgccagcacaaattgcccgcttctaccgcggatatggctgccgctcatctgcatgcgatggcgctggcacagttgcgcggtcatacactaccgttacgcactgactggctggatgccatagcaggcagcctgattaaagaagccctgaacgcgccgttgccgtggagctatcgcggcgttattcatcccgataccgatccgattctgctaacgttgatagacacattagcgggtgacggattcggtaaacttgccccttctacgccacaaccgcctctgccaaaagatgtcacctgcgaactggaacgtaccgcaatctcccttccggcggagcttaccttaaatcgctttacccccgatgggctggcgcaaagtcaggtgttacatcggctggcaatactggagatccctgggattgtacgccagcagggaagtacactgacacttgcaggcaacggtgaagaacgctggaaattaacccgcccgcttagccagcatgcggcattgattgaggccgcctgttttggtgccacactccaggaagccgcacgcaataaattagaagccgatatgctggacgcgggcggaatcggcagtatcaccacatgtcttagccaggcggcgttagcgggtctggcgtccttcagtcaacaattactggagcaactcacactattaatcgcccaggaaaatcaatttgccgaaatgggccaggcgctggaagtgctttatgccttatggcggctggatgaaattagcggtatgcaaggcgcgcagatattacaaacgacgttatgcgcgactatcgatcgcacgctgtggctgtgtgaatctaacggcagaccggatgaaaaggagtttcacgctcacctgcatagctggcaagcgctttgccatattctgcgcgatctacatagcggcgttaatttacccggcgtttctctttctgcggcggtagccttactggagcgacgcagtcaggcaattcatgccccggcgctggatcgcggcgcggctcttggcgcactaatgcgtctggaacatcccaacgccagtgccgaagcggcgctgacgatgctggcgcagttatccccggcacaatctggtgaggcgctgcacggtttgctggcgctggcccgccatcaactggcctgtcagccggcatttatcgccggtttcagcagtcatttaaatcaactgagtgaagccgattttattaacgccctgcccgatttacgcgcggcgatggcctggctaccaccacgagaacgcgggacgctggcgcatcaggtgcttgagcattatcaactggcgcaacttcccgttagcgcgctgcaaatgccgttgcattgtccaccacaggccattgcacatcatcaacaactcgaacagcaggcactggcaagcctgcaaaactggggagttttccatgtctgaactgaacgatcttctgaccacccgtgagctacaacgctggcgattaattcttggcgaagcggcagaaacgacgctttgtgggctggatgacaacgcccggcagatagaccacgcgctggagtggctgtatgggcgcgatcctgaacggctccagcgtggtgaacgttccggtggattaggtggcagtaatctcaccacccctgagtggatcaacagtattcacacgctgtttccgcagcaggtgattgagcggctggaaagcgatgccgtgctgcgctacggcattgaagatgtggtgacgaatctcgacgtgctggaacgtatgcagccttctgaaagcctgctacgcgctgttttgcacaccaaacatctgatgaaccccgaagtactggctgccgcccgccggatagtgtgccaggttgttgaagaaattatggctcgactggcaaaggaagttcgtcaggctttttctggtgtccgcgatcgccgtcgccgtagttttattccactggcgcgaaactttgatttcaaaagtactctgcgcgccaacctgcaacactggcacccgcaacacggcaagttgtatatcgaatccccccgctttaacagccgcattaaacgccaaagcgaacaatggcaactggtcttactggttgatcaaagcggaagcatggtcgatagcgtgatccactctgcggtgatggcggcctgtttgtggcagttacccggcattcgtacccatctggtggcgtttgacacaagcgtcgttgatctcacggcagacgttgccgatccggtagagttattaatgaaagtacagttgggcggcgggaccaatatcgccagtgccgtggagtatggtcggcaacttattgaacaaccagcgaaaagcgtcattatcctcgtgagcgatttttacgaagggggtagtagtagtttactgacgcatcaggtgaaaaagtgtgtccagagcggcatcaaagtgctgggactggcagcgctcgatagcaccgcaacaccttgctatgaccgcgatacggcccaggcgctggttaatgtcggcgcacaaatagccgccatgacgccgggcgagctggcaagttggcttgcggagaatcttcagagttgacataacttgcggagaatcttcagtcatgaatagtctacgtccggaattattagaactgacaccgcaggccctgacggcgttaagcaatgccggttttgttaagcgcagtcttaaggaactggaaaatggcaacgtcccggagatcagccatgagaacgacgctttaatcgccaccttcagtgacggtgtccgtacccagctggcgaacggccaggcactgaaagaggctcagtgcagttgcggggccaacggtatgtgccgtcatcgcgtgatgctggtgttaagttatcaacgactttgtgccaccactcagtctacggaaaaagaagaagagtgggatccggcaatctggctggaagaactggctacccttcccgatgctacccgcaaacgcgcacaggcgctggtcgctaaaggcatcaccattgagttgttctgtgcgccgggtgaaattccctctgcccgcttaccgatgagcgatgtgcgtttttattcccgcagcagtattcgtttcgcccgttgtgattgtattgaaggcacactttgcgaacatgtcgtactggcggtacaggccttcgtcgaggccaaagcgcagcaagcagaatttaaccatttaatctggcagatgcgcagcgaacacgtcacaagttctgacgatccgtttgccagcgaagaaggcaacgcgtgtcgtcaatatgttcagcaattaagccagacattatggcttggcggcatcagccagccgctcatccattacgaggcagcattcaaccgcgcattgcaggcggcagagacctgcaactggcgctgggtgagtgaaagcctacggcaactgcgcgccagcgttgatgccttccacgcccgcgccagccactataatgccggagaatgcttacatcagcttgcggcattaaacagtcgattaaattgcgcacaagagatggcccggcgcgacagtattggtgaagttcctcctgtgccgtggcgcacggtcgttggctctggcattgccggagaagcaaagcttgatcatctgcggctggtgtctttaggtatgcgttgctggcaggatattgagcattatggtttacgcatctggtttaccgatcccgacaccggcagtattttgcaccttagccgcagttggccgcgaagtgaacaggaaaacagtccggcagctacgcgtcggctgtttagttttcaggctggcgcactggcgggcgggcaaattgttagtcaagcagcaaaacgcagtgccgatggcgagctgctgttagctacccgcaaccgcttaagcagcgttgtgccgctgagccctgatgcctggcaaatgttgagcgcgccgttacgccagccgggcattgtggctttgcgggaatatttacgccagcgtccccccgcctgcatacggcctcttaatcaggtcgataacttatttattctgccggtcgctgagtgtattagcctcggttgggacagcagccgccagacgctggatgcgcaggtcattagcggcgaaggggaagataatgtgctgacgttaagtttaccagccagtgccagcgcaccttatgccgttgaacgcatggcggcgcttttgcaacaaacagacgaccccgtgtgtctggtttctggctttgtcagttttgttgaagggcaattgacactggaaccacgggtgatgatgacaaaaacccgtgcctgggcgctggacgcagaaactacgcctgtggcaccgctaccttctgccagcgttttgcctgtgccgtctactgctcatcagttgctgatacgctgccaggcgttacttattcaactgctccataacggctggcgctatcaggaacagagtgctattggtcaggcataattgctggcgaatgacctcaccgcggtgggtttttatcggctggcacatgtgttgggacaatttcgtaatacagaaagcgaggcacgggtagaagcaatgaataacggtgttttgctttgcgaacaattattccccatgcttcagcaacaaggatgaaatagtgctttttactaagagttctactccagttccggactgctcacgccacggtattaggcatatcctatatagcccctggtgagagtcaccagttccttgattaaataaaatggagttttacatgaaggctttcaataagctgttttccctcgttgttgcatctgttctggttttctctcttgctggctgcggtgacaaagaagaaagcaagaaattcagcgccaatctgaacggcactgaaattgccattacctatgtctacaaaggtgacaaggtgcttaagcaatcttctgaaaccaaaattcaatttgcctccattggtgcaaccaccaaagaagatgctgccaagacacttgagccgttaagcgccaaatacaaaaacatcgcgggtgttgaagaaaaattaacctataccgatacctacgcgcaggaaaacgtgactatcgatatggaaaaagtggattttaaagccctgcagggtattagtggaatcaacgtttctgctgaagatgccaaaaaaggtatcactatggcgcaaatggaactggtgatgaaagccgctggttttaaagaagtgaaataatcggttggcggtcatgctctaaacatgaccgccaattttttagccttttttcacatgctggcgcgctgccagtccacgcagaaaataacgtaaaaattgatcgccgcattcgcggaagtttttatgatccggtgcgcgcatcatcgctgtaatttccggcatgctaacgcggaactgctgttcggtgaggatagccagaatgtcatcggttttcaggctaaacgcgatgcgtaattttttcagcacgatgttgttattaatgcgacgttccggctccagtgccggagcagactcatccttgccgcgtttttcataaatcaggccattgaggaaactgctcaaaacaatgtccggacaacgctgaaaaccctcttcgtcttctttacgtagccagacggcgatctgttccgcggtggcttcgacattacccagcgccagaatacgcaccaggtcattattattggctttcaaaatgtagcgcacgctgcgcagaatatcgttacttagcatgaggccttcaggtgttgatgaggcaaaaagccattttagcagtcttttacaggccaatcgcctcttttaagcttttcagataacggcggctgaccggcacggttaagccattacgcaaaatcaactcggcctggccgttatcttccagacgaatctcctgtaaatgcgcgaggttaaccagatactgacgatggcagcgcagtagtggtgtacgactttccagggtacgtaatgtcaattcggtaaagccctctttcccttcgtggctggtaacgtagacaccgctcatccgactgctgacaaatgccacatctttcatttgcagcaaataaatccgactatgccccgtacaagggataaatttcagcgcctgttgattttccggtaacaggctaacatcctgcttgctgcgctcctgacgcaatcgcgccagcgttttctccagtcgcgcttcatcaattggcttcagcagataatcaaaggcatgttcttcaaaggctttaattgcgtattcgtcaaacgcagtgagaaaaacaatatacgggcgatgttccgggtcaagcatccccaccatttccagaccactgatgcgcggcatctggatatcgagaaacagcacatccgggcgcagtttatgcaccgcgccgatcccttccacggcgttactacactctccaacgatttcaatatcgctctgctcctgcaaaaatacacgcaggttctcccgtgctaacggttcatcatcgacaattaagactttaatcatgcctcgtccctccatggtagtcgtaacgttattcgggtgtaactatcaggctcacaggcgacgcttattccatagtcatcgccaaaccgttcacgtaaacgcttatccaccagattcatccccagcccactggcattggttaccggttgatacaaaccggcattgtcttcgatctccagcatcaaatgttgcccctcacgtcgggcgctgattgccactcgccctgtatccagcagttgacttgtcccatgtttaatggcgttttccactatcggttgcagggtaaacgcgggcaattgctgctgggataattcttgcggaatagcaatgttgacctgcaaccggctctggaagcgcgccttttcaatttgcagataagcattcacatgttcaatttcgtcggcgagagtaacaaactcgctaggccgctttaagtttttgcggaaaaaagtggaaagatactgcaccagctggctggcctgttcgctgtcgcggcggatcaccgctttaatggtgttaagcgcattaaacaaaaaatggggattcacctgggcgtgaagcagtttgatctcactctgggtgagcatcgctttttgccgctcatattgcccggcaaggatctgcgcgctaagcaattgcgcaatcccctcacccaacgtgcggttgatgctactgaataaacggtttttggcttcatacaatttgatggtgcccatcacccgctgattttcaccacgcaacggaattaccagcgtgctccccagtttgcattgcggatgcaaagagcaacggtaaggtacttcgttgccatcagcgtagaccacttcaccggtttcaatcgcttttaaagtataagtactagaaatcggtttgccgggtaaatggtggtcgtcaccaattccggtaaaggccagcaatttctctcgatcggtaatcgcgactgcaccaatatccagttcctgatacagcacctgagccactttcatgctgttcacttcgttaaacccctggcgcaaaatgccttccgtgctggctgccactttcagcgcagtggcagaaaaagcgctagtgtatttttcaaacatcgcgcgtttatcgagcaatatacgcataaacagcgccgcgccgacggtattggtgaccatcattggcgcagcaatattactcaccagacgcaccgcatcttcataaggtcgggcgatcgcaaggatgatcagcatttgcaccatttcagcgacgaacgtgacggcaccggcggtaatggggttaaagactttatcagtgcgcccgcggcggatcaggatgctgtgtaccaggccaccgagtaatccttcaacgatggtgctgatcatgcaacttaacgcggtcatgccccccatgctatatcgatgtaagccgccggtcagcccaaccagcccaccgacgaccggaccgccgagtaagccgcccattaccgcgcctatcgcacgggtattggcaatagaatcgtcaatgtgcaacccaaaccaggtgcccatgatgcagaagatggaaaagacgatgtagcagagaaatttatgcggcagacgaaccgtgacctgcattaacggtatgaataatggcgttttactcattaaccatgcaatgactaaaaaaacgcacatctgctgaagcagcagcaacaccagattaaaatcgtacatacccgcaaaccacacttccctttaaaacgcgtaacatacattgcctgcgtttaactttctttgaactcttgcagaaaaatgagaattcgtgagtacgatcactcaaaatcgcctggcaaaaataaaatcaccctatagatgcacaaaaaacgggcaaaactacctggttcgcaaaactgcgtctaaagttaaaccgggacctcgcgagcaagggtgagacgatggcgctttacacaattggtgaagtggcgttgctttgtgatattaatcctgtcacgttacgcgcgtggcagaggcgttacggattgctgaaaccgcaacggacagacggcggtcatcggctgttcaacgatgccgatattgaccggatccgcgagatcaaacgctggatcgacaacggcgtgcaggtcagcaaagttaaaatgctgctcagtaatgaaaatgttgatgtgcagaacggctggcgcgatcagcaagaaacattactgacttacctgcaaagcggcaatctacatagcctgcgaacgtggatcaaagagcgcggtcaggattaccccgcccagacactcaccacacatctgtttattcctctgcgccgacggcttcagtgccaacaaccgactctccaggcgctgctggcgatcctcgacggcgtactgatcaactacatcgccatttgtctggctagcgcacgtaaaaaacagggtaaagatgcgctggtggttggctggaatattcaggataccacccgtctgtggctggagggctggattgccagtcaacaaggatggcgcattgatgtcctcgcccacagcctcaatcaactacgccctgaactattcgaaggccgtacattgctggtgtggtgcggtgaaaatcgaacctccgcccaacagcagcaactcaccagttggcaagaacaaggccatgatattttcccactcggcatttaatgattcgttaacaaatgcgctttactgtacaatcctttcgttaacataaggagtgcattatgcgcatagctaaaattggggtcatcgccctgttcctgtttatggcgttaggcggaattggtggcgtcatgctcgcaggttatacctttattttgcgtgctggctaagcgcctgcaccagcctttcaaacaggcggtctgcgatgatcgccgccagtgccaccagtaacgccccctggatcacatacgcggtattaaatccgctaagcccgatgatgatgggcgtacccagcgtgctggcccctaccgtactggcgatcgtcgccgtaccaatgttgataatcacgctagttcgcacgcccgccagaatcaccggagccgccagcggtagctcgaccttacgcactcgctgaccacgactcattcccatacctttcgcaacttctgtcacgctggcatcaatcgctcccagcccggcaagtgtcgcctgcaggacgggcagcacaccgtaaaggatcaaggcgataatcgctggttgcagaccaaagccgatcaccggaacggcgatcgccagcactgcgacgggcggaaaagtctgtccaacggcggcaatagtttccaccagtgggcgaaattccgcgccccacgggcgagtgacagcaattccggcaccagtgccaatgatcaccgcaaacaaactgctaattcccaccagccagaaatgagccagtgccagagctgcaaaactttcttgctgataaacgggtcgtggcagttgtgggaacaaggcagcaaacagcggctggctgtaaggcagccagaaaatcagcgccacaaacagagcaatgagccagaacagcggatcgcgcaacatcttcatacgcttacgcctccaccagcagatcctgaaaatgcagcgtgccgcaaggctggccctgcatgttcaccaccggcagcacctcgcatccccgcgcaacaaacagagagagcgcatcgcgtagcgtcatctcttctgccagtgcctcaccatctgctcgttcttcgcgacgcacgtaatccgccacactacgtaagctaagcaggcgcacacccagttcactacgtccaaaaaactggcggacaaaatcattcgccggacgagtcagcatcgtcagcggattgccctgctgcactacttcaccgtgatccatcaataccagatgttctgccagccgtagcgcctcatcaatatcatgagtgaccagcacaatggtacgccccagcaaacggtgaatgcgcgtcatctcttgttgcaacgcgccgcgcgttaccgggtccagtgcgccaaaaggttcatccattagtaagacttgcggatcggcagccagtgcacgcgccactcccacacgttgctgctgaccaccggaaagctgatgcggataacgctcacgcaaattactctccagccccagtagcgccattaattcgtcgatacgatcgtcaatccgcgcccggctccatttttgtaattgcggcacggtagcgatgttttgcgccacgctccagtgggggaacaggccaatagattgaatggcatagcccatccggcggcgcaactccagtactggcaggctgcgaatttcttctccggcaaagcggatctctccgctgtcatgctccaccaggcggttaatcattttcagggtggtggatttgccggagccagatgtgccaatcagcacgctaaaactcccttcctgaaaattgagattgagatcgttaacggctttttgtgcgccgaacagtttgctgacatggctaaattcaatcattacgtttcaccttcagcagtgcgataagcaaatcgaacagcgcgtcggtaagcaccgccagaacaattaccgggatcacccccagcaacactaaatcaatggcgctgcttagcagcccctggaaaaccagcgcaccaaaaccgcctgcgccgattaacgccgcaatcaccgccatacctacagtttgcaccatcaccacccgcaggctgcgcagaaataccggtaacgccagcggtaactgaacatgcaggaaacgctgcgccccgctcatccccatcgctctggcgctttccagcacatcgcgcgggatctggttcaaaccgactaccacgccgcgcaccagcggcagcaaggcatagagcaccagcgcaatcagtgcgggtgtcattccggttcctgctatgccgagcgtccccagccacggaaaggccgtaaccagcgcggcaagcggcgcaatcaacaggccaaagagcgccacgctaggcacggtctgaatcacattgagcagagaaaaaattgccccctgccgagcagtggaaaagtagcaccagatgcccaacggcacaccaatcactaacgcaggcagcaccgcaccaaacagcaacgtcagatgttgtgccagcgcgtcgtcaaacacatcctgacggttggcgtattctttcattagactgagatcgttaagcgtgccggagtacagcaaccacagcggaataatggcaatctgcatatgcaacaaccagcgccacagcggatgcgtggagattcggcggatggcatcgctacaggccagcaatgccagcgccgcagccagccagaaaccactgccgaggctggtacgcgccagcgcactgccattttgcgccagttgggtcgccgcctttccagctccccacaccagcaatacgaagacgaattgcgccagaatgagtgcacaaatgctgccttttttaccgggaataaaacaggccgtcagccaggcgcaaccaacgcccaccagcatccagatcgtttgcggccacagctgccagagatgacgcccctcaccgctaactaaacgattaggcgcgtaactgataaacggcagcgccgctgcgattgccgtcagcaacagcagcagcgccagaacaggattaatacggaaataagtcacgggaaattacttcgtccaccctttttgtttcaggtagtcggcagccacttttttggcatccagtccttccacagcaatgctggcattcagttgctgcaatgtttttgcatcgaggctggcgaagactggctgtagccactgtgccatttgcggatactccctcaacacgctctcacgcaccactggtgcaggcgcgtagataggttgcacaccttgcggatcgcttaaggtttgcagccccagcgccgctaccgggccgtcagtgccgtaagccattgcagcattaacgccagaggtttgctgggcagcggctttgatcgtcaccgccgtgtcgccaccagccagactcagcaactgatcctgaccgagcttaaagccataggctttttcaaacgcgggtaacgcatcggcgcgttcgataaactctgcgctggctgccagtttgaaggtgccgccctcttgcagataacgactcaggtcggcaaggctagtgagtttatttttctctgccacatcctgacgcacggcgatagtccaggtgttatttgcaggcgcgggcgtcagccagattaacttgttgtgctcgctatcgagctttttgactttctcgtaaccttgctgcgcgtttttccacgctgcatcgttttcatctttaaagaagaaagcgccattgccggtatattccggatagatatccagttcaccggaagtaatcgccccgcgcaccacaggagtcgttccgagttgcactttattcaccgtcggtacgccgtggctttccagcacctgcaaaatgatattgccgagtagcgcaccttcggtatcgattttactaccgactttaacgggggaagccgcctgtagcggcaggctcacggctgccaacataaccagactacctgcccagagctttaagagtggcatgatgctttcctcattcttttactgttgttttcagcgaattaagagaaaagcatagttgataatggcggggttagcttgagcggaaggattcagttgcagaatcagataaatacttaagaggcatattcggtccggcgtttcctgccggatgcggcgcgagcgccttatccggcctacaaagggcgcaaacgtcgcgcccttactaaagcattacagcaactcaaactcgcctttcttaacgcgtgcggaatcagtgccgataaagacattgaacttgccaggctcggcgtcatatttcatctgttgattccagaacttcagcgcctcaatatcgatcgggaagctgacagtctgagtttcgcccggtttcagggtgattttctcaaagcctttcagctgtttcacagggcgactcatggaagccgtcacatcctgcaagtacatctgcactaccgtggcaccctcgcgcttaccggtgttcgtcacctgcacgctggcagtcactttgccgtcacgcttcatggtcggcgcagaaagtttcacatcagagacggtgaaagtggtgtagctcagcccatagccgaacggatacaacgccccgttagcttcatcaaaataacggctagtgtatttgttcggcttgtcggcattatacgggcgaccggtattcagatggctgtagtacaccgggatctgcccgacagaacgcgggaaggacattggcagcttgccggacgggttgtaatcgccaaacaatacatcggcaattgcattaccgccttcagtccccgcaaaccaggtttccagaatcgcatcagcctgctgatcttctttcaccagcgccagcggacgcccgttcatcagcaccagcaccagcggtttaccggtggctttcagcgccgcaatcaagtcacgttggctttgcggaatagtgatatcggtccggctggaggcttcgtgcgccatcccctgtgcttcaccgactacagccaccaccacatcagattgtttcgccgtctgcaccgcttcatcaatcatctcttgcgggctacgcggatcgactttgaccgcttcttcatactgattcaggaaatcgataatgcctttgtcactggtaacgttcgcccctttggcatacagcactttaccgttttcaccgacggcatttttaatcccggtcagtacggtcacggattgatcggcaacaccggctgcggaccagctgcccatcacgtcacgtttactgtccgccagtggcccaaccaccgcaatggtggcgctttttttcagcggtaacgtttcgagacggtttttcagcaacaccaagctttcgcgcgccacttcacgcgcttctttacggtgcaggcggctttcggcattggtatccaccgggtcagactctttcggccccaaatggctgtatgggtcgttaaacaaccccatatcatatttaacgttcagtacatggcgggcagcatcgtccagctctgccatcgtcactttgccggatttaatcaacccaggcagatacttgctgtagtactcgtcgctcatgctcatgttgattccggatttcagcgccacgcgcaccgcatcttccgggtctgccgccgtgccatgtttaatcagctctttgattgcaccgtgatcggaaacggtgatgcctttaaagccccactggtcgcgcagaacatctttcagcagccaggaatcggaggtggctggcgtgccgttcaggctgttcagcgccaccatcaccgcgccgctgcctgcgtccagccccgctttgtacggcggcatataatcattaaacaggcgctgcggactcatatcgacggtgttgtactctttaccgccttctaccgcgccgtatgcggcaaagtgtttgacgctggtcatcacgctgtagcgatctgccgggcttttaccctgcatcgcttccaccatggttttacccattgtactggtgagatacgtatcttcgccaaaaccttcggaagcacgtccccagcgcggatcgcggctgacatcgaccatcggtgcccaggtcatattcaggccatcatctgccgcttcataagcagagacacgtccgaccgttttcactgcatcgaggttaaaagagctggccagaccgaggctaatcgggaacaccgtgcgctgaccgtgcagcacgtcgtaagcaaagaaaagaggaattttcaggcggcttaattccatcacctgatcctgcatggcgcggatatcctgacgggttacggtgttgaaaatcgccccaacctgaccgtctttgatcatctcgcggatcgcctctttcgggttatccgggccgacgctgattaagcgcagctgaccaattttctcatcaactgtcattttcttaagcagttcggtgacgaacgcatcccgcgcttcgggcgttaatggatggttgccgaataaatcatccgccagtgctggctgcagggccagactcaccgcgattcctacactacatagccatttcatatggatttttcttcctttgttgcccgacgtggcagcgaaaatggtgcaaaaaccgtagtttgccataagcatgatggagagagaaaaagaatgctcagtttattgtctgaattttcaaaatattcactcgctgaattgttatacaaggcgctattctagtttgtgatattttttcgccaccacaaggagtggaaaatgtcttccatgacaacaactgataataaagcctttttgaatgaacttgctcgtctggtgggttctagtcacctgctcaccgatcccgcaaaaacggcccgctatcgcaagggcttccgttctggtcagggcgacgcgctggctgtcgttttccctggcagtctactagaattgtggcgggtgctgaaagcctgcgtcaccgccgacaaaattattctgatgcaggccgccaatacaggcctgaccgaaggaagcacgccaaacggtaacgattatgatcgcgatgtcgttatcatcagcaccctgcgtctcgacaagctgcacgttcttggcaagggcgaacaggtgctggcctatccgggcaccacgctctatagcctggaaaaagccctcaaaccgctgggacgcgaaccgcacagtgtgattggaagtagctgtataggcgcaagcgtcatcggcggtatttgtaacaactccggcggcagcctggtgcaacgtggcccggcgtataccgaaatgagcttattcgcgcgtataaatgaagacggcaaactgacgctggtgaaccatctggggattgatctgggcgaaacgccggagcagatccttagcaagctggatgatgatcgcatcaaagatgacgatgtgcgtcacgatggtcgtcacgcccacgattatgactatgtccaccgcgttcgtgatattgaagccgacacgcccgcacgttataacgccgatcctgatcggttatttgaatcttctggttgcgccgggaagctggcggtctttgcagtacgtcttgataccttcgaagcggaaaaaaatcagcaggtgttttatatcggcaccaaccagccggaagtgctgaccgaaatccgccgtcatattctggctaacttcgaaaatctgccggttgccggggaatatatgcaccgggatatctacgatattgcggaaaaatacggcaaagacaccttcctgatgattgataagttaggcaccgacaagatgccgttcttctttaatctcaagggacgcaccgatgcgatgctggagaaagtgaaattcttccgtccgcattttactgaccgtgcgatgcaaaaattcggtcacctgttccccagccatttaccgccgcgcatgaaaaactggcgcgataaatacgagcatcatctgctgttaaaaatggcgggcgatggcgtgggcgaagccaaaagctggctggtggattatttcaaacaggccgaaggcgatttctttgtctgtacgccggaggaaggcagcaaagcgtttttacaccgtttcgccgctgcgggcgcagcaattcgttatcaggcggtgcattccgatgaagtcgaagacattctggcgttggatatcgctctgcggcgtaacgacaccgagtggtatgagcatttaccgccggagatcgacagccagctggtgcacaagctctattacggccattttatgtgctatgtcttccatcaggattacatagtgaaaaaaggcgtggatgtgcatgcgttaaaagaacagatgctggaactgctacagcagcgcggcgcgcagtaccctgccgagcataacgtcggtcatttgtataaagcaccggagacgttgcagaagttctatcgcgagaacgatccgaccaacagcatgaatccggggatcggtaaaaccagtaaacggaaaaactggcaggaagtggagtaaaaattacggatggcagagtatcgccatccgaattcacttaatcgttctgtgccgtctgccccgccgccgccatttgggcggctttttgttttttatagctcaacgctgctgccggcacaggcatcactttaccggtttcaatccaggtacgcaggcggctggcatcggcaaaatgggtatatttgccaaacgcgtccatcactaccagcgccaccggtttattattgataaccgtacgcatcaccagacaatggcccgccgcattggtaaagccggttttggttaactgaatattccagttatcgcgatacaccagatgattagtattgcggaacggcagcgtatacgtcggattagagaaggttgccatatcttcccgggtagtacttaactgcccgatcaacggatattgtttgctggcaatgagcagtttggttaagtcacgggcagtactaacgttatgcacgctcaatccggtaggttcaacaaagcgcgtgttgttcattccgaggcttttcgctttcgcattcattgccttaataaaggctttgtaaccaccgggataatggtgcgcaaggcttgccgccgcgcggttttcactagacatcagcgccagcaacagcatatctttacggctgatttcgctattcagtcgtacgcggctatagacccctttcatctccggcgtctggctgatatccacttttagtttttcatccagcggcagtcgtgcatccagcacaaccatcgcggtcattaatttgctgatagacgcaatcggacgcaccagatccgggtggttgctatagatcactttgttggtattcagatcaacaatcatcgcgctaccggaggcaatttccggttgactagcggtggtagcggctgccgttttcgcaacggcctgcggtgcaaaaggcacagccagcatcagggccaggctaaataaagaaactcgaaatttcggcatgatgagcattcagatagtggttcacgcgcacgggttgcgcaccgccggagtaaggatttactgaggctagcgacgccatcataacgagcaaaaagtgcgatcgtcaaaggagaatcgtgaggaaatgctgcattgctgacatttacgccagcaatgcaacgtcaaagaactttttagaacaaacgataaccgtagccccatagtataacggttagggcgagcagcacttccagtaccagcacgccaatcgccagcgtgctactagagaagctaaggccttcctctttgttgatattcaggaagctcggaataccaaggtaaagcaggtagccggtgtaaaacagcgccaccgtgccgaccagcgcacacaaccagaccagtggataaagcgccaccagaccgcttaaaaacagcggagttgcaacgtagcccgcgaagaccatgcagtgcgcaagactcggacgctgcggataattacgcgccatccaccagatgacccgccccatcaccgcgaccccagccagcataacgccgtaaaacaagacagccagcgccagtccggtaaaccaggataacttcaggatagtgccatcgccaaaattccagccaatctgtgtagtgccaatgaaggcgcaaatcaccggaatcgccgccatcagcaaaacgtggtgggtgtaatggtgagaaatcgtttcgttttcgcgattaatcacctgcatttcacgatcgggatgggaaaacagtccccagacatggctcataccgcccccttgttgtgagttcatgaacctgacagttcaagtataagtcagcttgtgattattttttgttcgcccatgtaattttcactgtctgatgaacgtcctttttcagcgtgaatgattcacagggtgtatgcttactggcaaccaaagggagacagactggcctatggatctcaatacacttatcagtcaatatggttatgccgcgctggtgatcggtagcctggcggaaggtgaaaccgtgactttgctgggaggcgttgcggcgcatcaggggctattaaagttcccgctggtggtactttctgtggcgcttggcggcatgattggcgaccaggtgctctatctgtgcgggcggcggtttggcggcaagctgttacgccgtttcagcaaacatcaggataaaattgagcgggcgcagaaacttatccaacgccatccgtatctgtttgtcattggtacgcgctttatgtatggctttcgggtgattggcccgacgctgattggtgccagccagctgccgccgaaaatctttctgccgctgaatattctcggcgcatttgcctgggcgttgatttttaccactattggttacgctggtggtcaggtgattgcgccgtggttgcacaatctcgaccagcatttgaagcactgggtctggttgattctggtcgtggttctggtggtgggcgtgcgctggtggctgaaacgacgcgggaagaaaaagccggatcatcaggcgtaaaaccattgccctggataaggcgttcgcgccgcatccgacatccggagtaccatgcctgatacgacgcttgtgcgtcttttcatgccgaccaaaatattacccaatgaaatatccacgcacctcactgcgttattctgggttgaactgtggattcgccaacataaagccgccatccactatcaagctctgcccggtggtgtaatttgcgccctcgctacaaagccacaccaccaggctggcaatctcatgcgttgcgccaaaacgccgcaagggaatgctaggctccgcgtcgggcttcacgtcgctgtcatccatgccattcattggcgtggcgatcgccccaggcgcgactgcgttcaccaaaatcttatgcctgaccagctccagcgccatcgctttggttaacccaccgagcgcatgtttagcggctgtgtaggcgctggcatccggcagcggcgtatgttcatgtacgctcgtaatgttgatgatgcgaccgccctgcccttgtttcaccatctgacgagccgcaatttggctgcataagaatgcaccatcgacatcaacggtaaaaatcttgcgccactcatcaaaagccatatcaagaaacggcgctttggtcattgcacccgcattattcaccagcacatcaatgcgccccagccgttgaatgagtttctccagcgccagtgccccttctggtagattgccgagatccagctgcacgatctccgcacgtacgccgtggctaactacctcacgcgcggtatcttttgccccttcttcatcactgtgccaggtaataccaatatcaaacccctgctgcgccagtaataacgcgcactctttgccgatcccgctatcggaggcggtaataatcgcaacctgtgccatcgagttctccacttaacgctgaataaacgttaagtatagaaggcgcatatcatcagcgtttgtaccccccgcccaacgcaccagtgagttgaatggaggcatccagccactgcccttgcaataacaggccattggcccgctcacgcagcgcggggattctggcttcgctgacgcgggaaccagcaatgatgcccgcgttaaagcgcgcctgcgcaagacctaccacacgcaaggcatcgcgctcaatttgcgcctgatgctggtttttctccgccagtgtctgaacctgactggctgcccgcgccacgtcattcaccgcttcaaccaccgctttgttgtagctggcgatagacaagttgctttcggcttttgcgatatcgagattggcgttaagacgaccactatcgaaaatgggtagcgtcaggcctgccgtaacgcccatttgctgcgcggaatgacggaacagatcgcttaagtgcaacgcatcctgttgcaggaaggccatcaggttgatgtcaggataaaatgccgcttttgccgcatcaatggtgcttaggctactctcaacgtaccagtgcgccgcctgcaaatctgcccgccgggccagtaaggagtaccccagttcatcaggaagctggcttgccactttcggcaacgcgaccggtttaagcttcaaactctttgtctggttatttgtaagtgcgcttaaccgtgcctcaataattttcattttccccgcgacatcgttgagctgctgccgggttttgctggcattaatatcggtttccacaccttcaacactagaagtaatcccgttctgatatagctggcgatcggtcgcgataatggtgttctgctctttttctatttgctgcaagaccgtgtttaacgccgcctgggtttgccactcccagtacaggcgggctacgctgccagccagcaattggcgggtttgctcgcgttccgccgcccgtgctttaaccgtacccaggcgggcagtaacctccgcccgattctttccccagatatcgagatgccagcccgccgttaagccaaaagtaccgttggtgtaccacgggccggtcgtacctgcggccggatcgttcagagcaaacggccccattaagccttctgcgctcattttttgccgctccatatccgccgaaaagtcgatctgcggaccatcctgagtggcaactgccttcgcctgggcttcagctagctgaatgcgctgttcagccacctgcatatccggtgcgttctgtagtgcattgttaattaaggaagactgttgattatcgtgatactccagccaccattggctgtctggccaaccattttcagcgccgtgggtaatgcggtgtcaacttgtgcagcgggcgtttgctggcttaacgcctggcgggtttcatgcataggcgcacacccggccagcatcagtaacagcggaaaacaggcgatggctggataaaaggaatcacgattcatgggggaataatcaggtaagaaaaggtgcgcggagattaccgtgtgttgcgatatattttttagtttcgcgtggcaatacatcagtggcaataaaacgacatatccagaaaaatatacactaagtgaatgatatcttccgatttatcttaatcgtttatggataacggcaaagggcttcgttttttcctatacttattcagcactcacaaataaaggaacgccaatgaaaattatactctgggctgtattgattattttcctgattgggctactggtggtgactggcgtatttaagatgatattttaaaattaattaatgtcatcaggtccgaaaataacgagaatatttcagtctctcatcctgttgcgctcctgtcatgtgcattgcttcatataatcactggcgcaaggagcgcgcagggggcggccaatcgccgccgccccctgcacccccgggctctggcgaacaaaatcgccgctgcgcggtgccctcggcttatcccttacggctaccgggtcgggcgcgaggtaacatccctgtaaaacgcgccctcagcccacatccatgtgggctgccccggccttcagggaacgcctcggcaattttgacgccaccaaacaaccgtgcggcctattgataaagagctaacacattgtcaaaaaacatcactatggttttttagagtttctcgatatcaattgcctgaatagcccttgcaatatcaggggaattattcaacacccgaacatgctgaaataattccgttgcttcatcgtattctttacgcaaataactcaaccactgtttaatccgcgcaacgtgatataacccggtatcgccctgcttttccagacgggtatatttttgcagcaaagcaaccacctccggccacggcattcgcggttcgttatattttaccacccggctcaggttgggaatattgagcgccccgcgaccaatcatcactgcgtcgcagccgctgatcgccatgcattgttgcgcgctctgccagtcccagatttcaccgttggcaatcaccggaatattcagccgctggcgaatatcgccaatcgcctgccagtcaatatgctccgcgcggtaaccctgctctttcgtccgcccatgcaccaccagctccgtagcgccagcctgttgaaccgcatcggcgatttcaaatttcttctcaccgctgtcccagcccagacgcactttcacgctgacgggcaaatgcgccggtacagcttcacgcatcgcttttgcaccctggtagatgagttcaggatctttgagtaacgtcgccccgccgccgctaccgttaaccgttttgctcgggcagccgcaattgagatccacgccccaggaacctaactccaccgcacgggcggcgttctctgccagccattgtgggaactgacctaacaactgcacgcgcaccagcgtaccagatggtgtccggctggcgttttgtagctcagggcaaatgcgatgaaagacttttaccggcagcagttgatccaccacgcggacaaactcggtgatgcacagatcgtagtcgttaacttcggtcagcaattcacgcaccagagagtcaagcactccctccatcggtgccagtaacacacgcatatcatcacccgcaaaaaaatgaggcgctatgttagcgcctatggtcagcggattaaaggtctgcaaagagggattgctgcaaactgcaatccctctctatgcttgatgtatgcctgagttcgctgcgcattgcgtaatgccggggagcgaaaaaataagcgctgatttcttaatgtgatcggtagcacgttttacgaattaattgtatgatgaatccatctcatctggggtgttgattatgagtaagacactgaacattatctggcaatatttacgcgctttcgtcctgatttatgcctgcctgtatgcaggcattttcattgcttccctgctaccggtaaccattccgggcagcatcatcgggatgctgatcctgtttgtcctgctggccttgcaaattcttccggcaaaatgggtcaatccggggtgctacgtactgattcgctatatggcgctattgtttgtgccgattggcgtaggcgtcatgcaatattttgatttgctccgcgcacagtttggcccggtagtggtttcctgtgcagtcagtacgctggtggtttttctggtggtgagctggagtagccaactggtacacggtgaacgtaaagtcgtaggtcagaaaggaagtgaagaatgatggcgaatatctggtggagtttaccgctgacattgattgtcttttttgccgcccgcaaactggcggcacggtataagtttcccttgcttaacccgttgctggtagcaatggtggtgatcattccttttttaatgctgactggcatctcttacgacagctactttaaaggtagcgaagtgctaaacgatctgctgcaaccggcggtcgtcgcgctggcctatcctttatatgagcagctacaccagatccgcgcgcgctggaaaagcatcatcaccatctgttttatcggcagcgtggttgcgatggtgacggggacttccgtggcattgttgatgggcgctagtccggaaatcgccgcgagtatcctgccgaaaagtgtcaccacgcctattgcaatggcggttggcggcagtattggcggtattccggcaatcagcgcagtttgcgtgattttcgtcggcatcctcggcgcggtatttggccatacattgcttaatgcgatgcgtattcgtaccaaagctgcgcgcggtctggcaatggggactgccagccacgccctcggtacggcgcgctgcgccgagctggattatcaggaaggtgcatttagtagcctagcgctggtgttatgcgggataattactagcctgatcgcaccgttccttttcccgattattctggcagtaatgggctaaaatttgcgatgcgtcgcgcatttttgatgtatgtttcacgcgttgcataattaatgagattcagatcacatataaagccacaacgggttcgtaaactgttatcccattacatgattatgaggcaacgccatgcatccacgttttcaaaccgcttttgcccaacttgcggataacttgcaatctgcactggaacctattctggcagacaagtacttccccgctttgttgaccggggagcaagtcagtagcctgaagagcgcaacggggctggacgaagacgcgctggcattcgcactacttccgctggcggcggcctgtgcgcgtacgccattgagcaattttaatgttggcgcaattgcgcgcggtgtgagcggaacctggtatttcggtgccaatatggaatttattggtgcgacaatgcagcaaaccgttcatgccgaacaaagcgcgatcagccacgcctggttgagtggtgaaaaagcgcttgcagccatcaccgttaactacacgccttgtggtcactgccgtcagtttatgaatgaactgaacagcggtctggatctgcgtattcatctgccgggccgcgaggcacacgcgctgcgtgactatctgccagatgcctttgggccgaaagatctggagattaaaacgctgctgatggacgaacaggatcacggctatgcgctgacgggtgatgcgctttctcaggcagcgattgcggcggcaaaccgtagccacatgccttacagtaagagcccaagcggtgtcgcgctggaatgtaaagacggtcgtattttcagtggcagctacgctgaaaacgccgcattcaacccgactctgccaccgttgcagggagcgttaattctgttgaatctcaagggttatgattacccggatatccagcgcgcggttctggcagaaaaagccgatgcgccgttgattcagtgggatgccacctccgcaacgctgaaagctctcggctgtcacagtatcgaccgagtgcttctcgcttaagcctggtgccggatgcggcgtgaacgccttgtccggcttgccagccctctcctggtgtcgaaattcccggcaaacagtttgccgtttcttgcgcaaaaccagcgggtaaagtagcctgatggaaattttccttagatcgagtctcctgcatgttaaagcgcgtgttcctcagcctgttagtcctgatcggcttgctgctgttgactgtgctcggcctcgatcgctggatgagctggaaaaccgcgccttatatctacgacgaattgcaggatctcccctaccgccaggtcggtgtggtgctcggaacagcaaaatattatcgtactggcgtaattaatcagtattatcgctaccgcattcaaggagcgattaatgcctataacagcggtaaggtaaattatctattactgagcggcgataacgcattgcaaagttataatgagccgatgaccatgcgcaaagatttaatcgctgctggtgtcgacccaagtgatattgttctcgattacgcaggctttcgtacgctggattccatcgtgcgtacacgcaaagttttcgatactaatgatttcattattatcacccaacgtttccactgtgagcgagcattatttattgcgctgcatatggggattcaggctcagtgttatgccgtaccgagtccgaaagatatgctgagtgtacgtattcgtgaatttgccgcccgtttcggtgcgctggctgacctttatatttttaaacgtgaaccgcgttttttagggccgctggtccctattccggctatgcaccaggtaccggaagatgcgcaggggtatcccgccgtcacacccgaacagttacttgaattacaaaagaaacaaggaaagtaattatggatgtacagcagttttttgtcgttgccgtttttttccttatcccgatattttgtttccgcgaagcatggaaaggctggcgcgcaggcgcgattgataaacgggttaaaaatgcaccggaaccggtgtatgtctggcgagcaaaaaatcccggactctttttcgcttatatggtggcatatatcggcttcggaattttatctatcggcatgattgtttatcttattttctatcgttaatattcccctctccagttaattattgagaataattattacttcacctgataagctgcggatatcacattcctaaccgcagctatttgtgaatcttttcacagtttaaattcccccgcacgcttagccttaatatcagtacattattatttactaaacgctcgccttaattacctatagcattaaggaagatcacatgccgcaacaaaattatctggatgaactcactccggcttttacgtctttactggcgattaaagaagcctctcgctgtttattatgtcacgacgctccctgtagtcaggcttgcccggcacagaccgatccggggaaatttattcgcagtatctactttcgtaattttaaaggcgctgccgagacaattcgcgaaaataatgccctcggtgccgtttgtgccagagtgtgcccgacggagaaattatgccaaagcggttgtacccgtgccggtgttgatgctcccattgatatcggccgcttacagcgttttgttactgattttgaacaacaaaccggaatggaaatttatcagcccggtactaaaacgctcggcaaagtcgcgattattggcgcaggtcctgccggattgcaggccagtgtgacactgacaaaccagggttatgacgtcacgatttatgagaaagaagcgcaccccggtggctggttgcgtaacggtattccgcaattccggttaccgcaaagtgtgctggatgcagagatcgcccgtattgaaaaaatgggcgtgaccattaagtgcaacaacgaagtcggtaacacactcacccttgagcagctgaaagcagaaaaccgcgcggtactggtcaccgtggggttaagtagcggttccgggctaccgctgtttgagcatagtgacgttgagattgccgtcgacttcttgcaacgtgcacgacaggcgcaaggcgatatcagcattccacaaagcgcattaattatcggcggcggtgatgtcgcgatggacgtagccagcacgctgaaagttctcggctgtcaggcggtaacttgcgtagcgcgtgaagagttagatgagtttccggcaagcgaaaaagagtttaccagcgcccgggagctgggcgttagcatcatcgatggattcacgccagtagccgtggaaggcaataaagtcacgtttaagcatgtacggttaagcggcgaactgacgatggcggcagataaaattattctcgccgtcggtcagcatgccagactagatgcctttgcggagttagagccgcagcgtaacaccatcaaaacacaaaattaccagacccgcgacccgcaagtctttgctgctggcgatattgttgagggtgacaaaaccgtggtctatgccgtgaaaaccgggaaagaagccgccgaggcgattcatcactatttagagggagcttgcagttgttaaattaatatttagagggagcttgctcatgttaacgaaagatcttagcattactttttgcggcgtgaagtttcccaacccgttctgcctctcttctagcccggtaggcaactgctatgagatgtgtgccaaagcctacgacacaggttggggcggtgtggtgtttaaaacgatcggcttttttatcgccaacgaagtcagcccgcgttttgatcatctggtgaaagaagataccggttttatcggcttcaaaaatatggagcagattgctgaacatccgttggaagagaatctggccgccctgcgtcggctgaaggaagattacccggacaaagtattgatcgctagcatcatgggggaaaatgagcagcaatgggaggagctggcgcgcctggtgcaagaagctggcgcggatatgatcgagtgtaacttctcctgtccgcaaatgacttctcatgcgatgggtagcgatgtcgggcaaagcccggagctggtagaaaaatattgtcgggcagtgaaacggggttccacgctgccaatgctggcgaagatgacgccgaatatcggtgatatgtgcgaagtggcgctggcggcgaagcgcggcggcgcagatggcattgcggcgattaacaccgttaaatccatcaccaatatcgatcttaatcagaaaatcggtatgccgatcgttaacggaaaaagcagtatttccggatattccggtaaagcggtaaaaccgatcgccctgcgcttcattcagcaaatgcgcacccatccagaactgcgcgatttcccaatcagcggtatcggcggcattgaaacctgggaggatgcggctgagtttttattgctcggcgcagcaacgttacaggtgaccaccggcatcatgcagtacgggtatcggatagtggaagatatggcaagcgggttgagccattatctcgccgatcagggatttgatagcctgcaggagatggtaggtctggcgaataacaatattgtcccggcggaagatttagaccgcagttatattgtctatccccgtatcaatcttgataaatgtgttggctgtggacgctgttatatttcctgttacgacggcggtcaccaggcgatggaatggagcgagaaaacccgcacaccgcattgtaataccgagaaatgtgtgggttgtctgctttgtggtcacgtctgcccggtgggttgtattgagctcggggaagtgaagtttaagaaaggcgagaaagaacacccggtaacgttgtaaaaccagagacgcatccggcatttggttcctgtcgccggatgcggcttgaacgccttatccggcctacaaaaccatacaaatcagtatgttgagcttattgtaggccggataaaacgcgccagcgttgcatccggcatttggctcctgttgccggatgcggcgtgaacgccttatccggcctacaaaaccacacagatcatgatgttatgtgcgtttatgaccgaatgcggaccacattcacatcatttcttacgcgcgtatttcagactatccagcgctacggcgaagataataatcgcccctttgatgatgtactgccagtatgggtttacgccgatatacgtcaggccatagttgatgacggtaaaaataattaccccggtcaccacgccaatcaccgtccccacaccgccgctgaagcttacaccgcctaccacgcacgccgcgatagcatccagctcatacataaagccgaggttgttggtggcagagccgatacgtccggcttctaacatcccgccaaaggcatagaacacgccagacaacgcgtagatcatcagcaggttcaggccgacgttgacaccagatacttttgccgcttccgggttaccgccaatggcaaaaatgttcttaccgaagcgggttttgttccacaacacccagacgaacgccaccgcaatcaacgcgtagaaggtgatgtaagagagacggaaactccccagcgcgacaaagccctgagcaaaggtagagaagccactgtcaaaaccagaaattgggctcgccccgacaaagtcgtaatagaggctgttgatgccatagacgatgatcatcgtgccgagcgtggtaatgaacggcgtcacgttgagataagcgataatcagaccgttgatcaaaccgatcaccgcaccaatggcacagacaatcagaataaccagcgcaatcggcatcgtcgccatttccgggaacactttgttggcgttatccatggactgcaataatgtcgcagccaccactgccgccagccctacctgacgaccagcagaaagatcggtcccctgggtgacaattaaccctgccacaccgagcgcgataataatacgcacgctactctgggtgagaatattacttaagttcaacagacttaaaaatgttgggtcctggaaaataataatcgccagcaaaactaaaagaacgacgtaaataccgccctctttcaggtaagtaagaaaacttttcttatttaacgcactcatgggaagcccctaatcttaaaggtgcaaagacgcaagacgcagaatttcgttttgcgttgttgtttttgtatcgacaattccggaaacgagaccattgctcatgaccagaatacggtctgttatccctaacaactcaggcatttcagaggagataataataatccccttgcctttcttcgccagttcggcaattaactgataaatttcaaacttcgccccgacatcaataccgcgcgtcggttcatcgagcattaatatttctggttgcgttagtagccagcgaccaataatcaccttttgctgattaccaccggagaggctaccaatttgcgtccgatgacccggcgtttttacccgcatgctatcaatcacccactgggtatcgcttttcatccggctgttatccagtaaaccaactttatttttgtagttgcgaatattggaaattaagctgttaaaaccaatatccagataggcataaattcccgtactgcggcgctcctcagttaccagtgcaaatccatggtttatggcttcgttggcattatggttattgatctgtttgccgtgcaacgttatggtgccagcgcttttctcgcgaataccaaataacgtctcaacaatatcggtacgtttcgcccccaccagaccggcaataccgaggatctcccctttatgcagatcaaagctgacatcgcgaatgctcggctggcgcagactcgtcaggttacgtacctcgaggatgacttcgcccggtttgttttctttgtcagggaaacgctggttaagagaacgcccaaccatcatggcgatgatcttgtccatcgtcagtcctgccagcggttcggtggcgatccactgaccgtcgcgcaatacggtaacttcatcacataactggaagatttcttccattttatggctgatataaacaataccgcagccgcgctcttttaatttacgaataatagtgaacagatgattgacctctttttcggttaagctagaagtcggttcatccataatcacaattttcgcgttataggaaaacgctttggcgatttcgatcatctgcatttggctaacggataatgtgccgacgcgcgcacgcggatcgatatcaatatccagttcgtcaaaaatcgctttggtttcgcggtacattttgtcctgatcgacaaacatgcctttggtgggatatcgccccagccacatgttatccatcacgctacgttgtaataccaggtttaactcctggtgtaccatgctaataccattttccagggcttcttttgcagaatggaaatcgatctctttaccctggaataaaatggtgccggagtctttttgataaataccaaacaggcattttaataatgtgctttttcctgcaccgttttcccccattaatgcatggatagaatgtggccggacttttaaattaacgttatcaagtgccttaacaccaggaaaggacttgttgataccgctcatttccaacaagtattccccggaggacggagtcgtactgctgaccatataattttaccttgttggccatacaataagggcgcagtaatagactgcgcccaatcagtcttatttcttgctgaattcagccaggttgtctttatctacgccaacataaggtacgcggaccactttgttgtcgattttccagttggtgccatcagccgcacctttaccatcggccaggtttttcgccagatcaaaggtcgctttcgcctggttgttagcatcgttcagtacggtgcccgccagtgcaccggatttcaccagcgccagcgcttctggcagcgcatcgacgccaaacaccggaatgctggacttgttgtgtgctttcagcgcttcaaccgcgcccattgccatcgcatcgttgttggcgataaccacttcgattttgttggcgttcgggccagacagccaggcgtccatcttatctttcgcctgagcggtgtcccacattgcggtatctaactgtaactgttcagttttgatgcctttatcgttcaattctttaatcacgtaagtggtacgtgcttctgcatccggatggcccggttcacctttcagcagtacgaactgaatctgaccgtctttgttcagatcccaaccctgattcgccgcccagtgtttagcaatcaaatcgccttgaataatgccggactctttggagtcagtgccaacgtagtaggctttgtcgtagctatccagcgccttacgagacggttctttgttgaagaaaaccaccggcacgttttgcccacgcgctttctcaatcaccgtacccgcagctgccgggtcaaccaggttgattgccagtgccttcacccctttcgccagcaatacgtcgatctgatcgttctgcttggactggtcattctgagaatcattcatcagcagctgaacatctggcgcggctttcgcatcttgctcaatagccttgcgcactacagacataaagttatcgtcgtacttatagattgttacaccaatgcgagtatcagcagcgtgtgcagcggcaccgaataacatgctggccatcacagcagacagggttaacaccttcttattcatggtatctccggtttttcttatgcagggtagtgcttgagataaatgctcggcggggcagtagagttaatgaagtgttactgaacgccgaagctcactttttaaaattcgttcttccatgcccggtaacgctccagaaaacggctttaattgttgttatgacgctgttacctcggcaaaagtgattattcactgttacatacgggttacaacgttaaaacggtgcaatcatagctatcacattgttaagatactgtgaaatcactcacagattgaaagcggttacatcgcctgatttgtactgttagtgatcgccgccgcattctggcgtgttgcgacagaatggcgacgcactaacgtcggcataaaacagtggctggcacgaggatcaatattgcctgctgccccctgcaaggccagttcggtggctaatttcgccatactagcaatgggataacgcacggtcgttaattgcgggtcggtgtaacgggcgatgggaatatcatcgaaaccgatgatactgagatgtaacggaatcgcaatgccattatcttttaatgctgtcagtgcgccagcggccatattgtcgttataagcaaatacagcggtaagttgtagattgcgccccagcagttcaaccatcgccgcctcaccgcccggcatgtccggcgtaccagcgccaatccagctttccggcggaataatatcctgctctttcaacgcactcatccagcctgctttacgcatggcgtcatcttcaatgccgtggctggaagaaagataaccaatacgttgatgaccgttattcagcaacatgcgcgtcgccattcgggcaccgctgagattatccaggcaaacgcaacgatgggcgtaccccggcacaacgcggttgattaacaccataccgggaatgttatccataaattgcgccagttcatcgtcactcaatgctttactgtgaacaatcaacgcattacaacgctggcgaattaacacctcaatggcgtgacgctctttttccgcttcatgatagctattgccgattagcacgtatttctgatgctgctgagcgaccagatccaccgcttttaccagcgcgccgaaaaacgcatcagaaacgtccatcaccaccacgccaatggtgtcgctaacctgagttgccagcgcctgggcattggcgtttggccgataatccagctcactcacggctttcattactgcttcacgcgtgtcggcactgaccagcgtgctgttattgagcacccgggaaaccgttgccacagagacgccagcctgacgcgctacatcacgaatggtgatcatattcactacctgttatgagattgcagtaaatgactgcttgctggcggctattttgtcagcactgaatacaggacttcgtgaatcgagtcacagcaatggaaacggttacagccgttttgttaacgaatgtgatccagatcgttatctacttgttttagatattgccggtccggcagcacgcaaagttaactgacgccagagccattccaccggcccctggcggaagtaacgcagccagataacagagaagaggatattcgccagccataccggaataacaaacgccagcagctccaggcggtcaaaatgcataaacaaaccgaggtggtaaaaaagcgtggtacaaatcagcgtttgcaatagatagttggtcagcgccatccgtccgacgcaggcgatcgcaagcaccagcttaaagcggctcaattgcggccagaagccataaaacaggctcgcatagccaatcgcctgaaacggcgcactcagttcccgcggcatttgaagtaagaaggcacaccagcgatacgcccagtccagctgccattgcagggcgatggcaggaaggttaatggtcaccccaatcgccaccagcacaaaaccagtacgacgatagtgacgtaagctgaactgccctttcagccagccgctgcgcatcagcgccgcaccaatgagcatcatccctgccagttgccagccatactgtgcgcccagtgccagtaaactgttgccaacaccatcggcacgattactgatcgcttcaacgccgccgtgaagcttccagtatttttcatacaaaatagcgcttgcatccggcgtccaggcgcggctggtctggctgtcggaaatcagccccaataacagcaaaacgccaagccccaccagataaagcatgacgcctgtattaaacaggctttttacgcttggcgcatcgcgcaccagccgccagcagattaagcccaccagcccgtaagccagcaaaatatcgccgtcccagaacaataaaccgtgaataaagcccaacaagactaacagcgttaaccggctctggatccagcgtctgccacggggcagcaacatttgcaggcccgcaccaaacagtagcgcaaaaagcgtgaggaatttcacctggccgatgagatcaagaaatgcccaagtccatgcatcccgcggcgtaatagcaccgtaccaggcgggattgagataagccgcctttggtagcccaaaggcgctgatgtttaatagcaggatccccagaatggcgacgccgcgaacaaaatcgagcgtgacgttgcgctccatggttcctgccttttaatcagttgtgatgacgcacagcgcgcagaaactcgtggcgcgtattctgactggatttgaacaatccaccaagagaggtcgttgtcgtggcactggttgcatcgcggatgccacgcgccttcacgcagtaatgcaccgcgtcgatgctgacagccacgttattggtgcccagcagcgtttgtagcgcaataagaatttgctgcgtcagacgttcctgcacctgcggacgctgggcaaagaactgcacaatgcggttaattttactcagaccgatcacgctatctttcgggatataggccaccgtcgctttgccatcgatggtaacaaaatggtgttcacaggtgctggtcagagtgatatcgcgcacggtgaccatttcatcgaccttcattttgttttcaatgagggtgattttcgggaaattggcgtaatccagaccggagaaaatttcatcgacatacattttagcgatgcgatgcggcgtttccatcaaactgtcatcagccaggtcgagattcagcagctgcatgatttcggtcatatgaccagcaataaggcttttgcgcgtttcgttatccatttcatgcacgggcgggcgcagcggtgtttccagtcctcgcgcaactaacgcttcatgaaccagggccgcttctttactgagacttggcatttatgatttctcctgcaggtgtgacgcctccgccctgcgtgggggcaaagttattaagctgatttacagcctgattattgtgcgtgaggcggcgcacataatccagtattcacagcgataattattgtaattgccgctgcctttcatcagcagatgttaaaacatcgttatgcaaatacggaagtgaaagttactcacagcacattgaataaacggtatgatgaagaaattgcaaacaacacaacaaggagccacgcatggaaatgctcgaagagcaccgctgttttgaaggctggcagcaacgctggcgacacgactccagtaccttaaactgcccgatgacgttcagtatctttctccctccacctcgtgatcacactccgccaccagtgctgtactggctttccggattaacctgcaatgacgagaacttcaccaccaaggcgggtgcccagcgggtagcggcggaactggggattgtactggtgatgccagacaccagcccgcgcggcgaaaaggttgccaacgacgatggctacgatttaggccagggcgcaggcttttatcttaatgccacgcaaccgccgtgggcgacgcattaccggatgtatgattatctgcgcgatgaattaccggcgctggttcagagccaatttaatgtcagcgaccgctgcgccattagcggtcacagtatgggtggtcacggtgcgctgattatggcgctgaaaaatccgggtaaatacaccagcgttagcgcctttgcgccaattgtgaatccgtgcagcgtcccgtggggaatcaaagcgtttagcagctatttaggtgaggacaaaaatgcatggctggaatgggacagttgcgcactgatgtatgccagtaacgcgcaggatgcgatcccgacgcttatcgatcagggcgataatgatcagtttcttgccgaccagttgcaacctgcggtactggcagaagccgcgcgccagaaagcgtggccgatgacgctgcgtattcagccgggatatgatcacagttactacttcatcgcctcttttatagaggatcacctgcgcttccatgcgcagtatttactgaagtgaaagtccgcccggttcgccgggcatcttctcatcagaagcgataatccactgccataaagtaacgacgtccgtcttcgttatagctgtagtcgtcacgactgagatccttgtcgccaaggttcagcacgcctgcgcgcagtttgacgtctttagtcacctgccaggccgcgccggtattccagatggtataaccgcccggtgttttagccgtcgcgctgtcggcgcgtttctgcccggtatagtgcccagaaacatagaaactccagtcttccagcgccagcggtttccagtccagcgtaccgttagcagtatggaacggcagatcggatagcggtttgttttcgccgttgctgacatcacgaccatcgttgtaggtgtagttgatgctcagtttccattcatcgttgaacggaattttcagttcggtttccacgccctgaatacgagctttgttaacgttgtagtagctaaataccggtatgcgccgtccgttagcgcccgtctcaaaaccaacaaagttttggtagcccggtgcagcgttgacgtcagacgtacggctgatgctgatacgatctttcacatcgttacggaaaacggtaacgctggattcaaccccttccagccagccttcttcacccatgtagtaaagccccagctcccaactttcgctggtttctggtttcagatccgggctacccacaatcttacatgcgccacggcaggaattgctcgtccagtcagggctaagttgcaacagagaaggtgctttaaatgccgtcgcccagccccctttcaccgttacggtgtcggtggcgttataaaccaggtaggcacgcggactccagtgttcaccgtaggtttcgtgatcgtccatacgcacgccggtcgtcagcgccagcggctcgaagatccgccattcatcttccacaaacagcgcgtactggctggcagacgttttggagctggttcccccggtcaggttcaccgcatcgctaagtttgtcgtgacgccattcaccgccaaccgtgagaaactgattaatcgccgtcagcggcaacgtgtatttgccgtcgaccgtattgctttcggaagttatcgggctgctgttgccagggtttttgttctcgactttctcaccgtagtatttcagttcgctggtgccgtaatcccaacgcccattatggctgacggagtagttctggcgttccaggcggtttttgtccaggctgtcggaatcacgatcctgacggtcgaaaccgtatccggcagtaaaatcgtgattttgattcggtgtccaggcaaattcgacattgccgtcgcggctggagaatccttcaatacgcggcgtttctccggtatcggtggtcgtactgttttgcgggtcatccttttcacgttttgccaggctgccgtaagctttcattcccagcacaccatcaattaatggtccactggtaaagaactgaccgttataggtgtcaccgcgatcgcgatgttcctgaatggtggtatcgacggtaacggtaccgctccatttctgaccgatttttttggtgatgatattcactacaccgccgagcgcatcggaaccgtacaggctgctcatcgggccacggaccacttcaatacgttcgatggaatcgaccgggatccagttcagatcgaaatcattgtggcggaagacggcattgcgggagttcacgcgtttaccgtcgacgagaatcagggtatagctgctgtccagaccacgaatactaacgcccttacggttatccccttcgttcgtcagttgtacgccaggcacttctttgaggacatccttcagattctgtaccggttttcgctgcaggtcttcctgggtaatgacgctgatactggcaggtgcatctttaagattttgttccacggaagatgcagtgacaaccatcgtttcgccatcatcatcgaccgctaacacaggccatgcacaagaaatagcggacaaacacagcccgacccgtacgaaagggttcaacctaaacattccatatctccatgaggtaactacgaaaataaaatgggttatcgctcacatcttcttcacgtccccttgcgtacggcagcatcgcggtggacttattttttatgcaggtgatcatcccagaaagccggaacagcctctgatttgtcagccttttttgattgcggcgtaacgataatgcaaacgataacaattatcaatccaaatgttaaattttatatccgcatgatttgtcagggaaatggaattgaaaaagccctctcggttgagagggcttagcaaggaagggaggaaacttatttcttatcgttctgcgggaacttcatttcgctgtagcgtacgaagtgagttcctttaatcagcttgtagccgaaccaaataatcaggaacagcgggataccaatatacgttgccgctacgccgccccagtcaatagtatctttcaggaacgcttcgtagttctggcccaaagtgataatcagacacagaatgaatgcgaagatcggccccagtgggaagaaaccactacggtacggcagatcgttaatgtcgtgtccctgcaatacgtaaccgcgacggaagcgatagtggctaatggcaatccccagccaggcgataaaacccgtcatcccggaggtgttcagcagccacaggtataccgtctggttgccaaacatggaggtcaggaagcacagaccggcaatcaccgtcgtcgcatacagcgcattacgcggcacgccaccacggctcagtttagcgaaaatgcgcggcgctttaccgtcacacgccagggtgtacagcatacgagtagacgcatacataccggagttacccgcactcagcaccgccgtcagaataactgcgttcatcaccgccgccgcagagagcagacccgcgtgctggaacaccagggtgaacggactaacgctgatgtctttaacatcgttacgcagcaggctcggatcggtgtacggaataatcaggctgataatcaggatcgcgaacacatagaacaacaggattcgccagaacacctgacgtaccgcgcgtggaatgtttttcgccggatcttcggactcgcctgcagcaataccgatcagctcggttccctggaaagagaagccgacaatcatagctacgccgatcatcgccgcaaaaccaccagcaaacggcgcttcgccgattgtccagttgctccagcccgcaggctgcgcgcctttgaagataccgataatcatcagcacgccaacgatgataaagacaataactgtcgtgactttgatcagactgaaccagtattccgcttcaccaaagccacgaacactgatgtagttcagcaggaagataacgccgaggaacaacgcactccagatccagcccggtgtatccgggaaccaccagctcatgaccagctgagctgcaaccaggtcaacggcgatagtcaccgcccagttgtaccagtagttccagcccagcgcgaagccaaagccttcttcaacatagttctgaccgtaagtggcaaagctaccggaaaccggcatatatgcagccagttcaccgagactggtcatcaggaagtaaaccatcaggccaatcagcatatagctgagcaatgccccgcccggacctgcctgagaaatcgttgcgccagaggcaacaaaaagacctgtaccgatggaaccgccaatggcaatcatcgtcaggtgacgcgcctttaattcacggcgtaagcccggcgcttctgtggttttagtttcggaaaccatacaaaaatgctatccatcttaaaaatgaggcgcgattgtagcagacgattggcaatccttccggcagaaatacacggttataagacaccttcatgatcgcccagggattataagtaaagcagccaatctcttttctggcgaatgcatgctgaaggcgctgcgtcacgaaatcgacacagcaccagcatgttcttgtacagcaacttaacgcggcacatttgcgggatcgcaatagtccagaaagcgccgtagcgcgttggaaaggtgtttttgccgatgatgtatacgccacaacgtacgcatcaggcgcggcagagggaccgcaacttcacttaatgtgcctgcctgcaattgatcttcaatcacacgtcggctcaggcaactaattcccaacccatgacgcaccgcatgtttgattgcctcggagttacctaattccatcgccatctcaaacttcggtaaatgactcagcaacagataatcgacaatctcccgcgtgccggaaccgcgttcacgcaggatccacggcgcagcggccagctgttctaaggtgaccggaccacgggccaacgggctagtcggcgcggcgaaaaccaccagctcgtcttccagccacggttcagaaatgatttcagtgctgtggcacggtccttcaataaagccaatatcaacgcggaaatccagcaccgcttgcatcacgtcctggctattcccaacgctaagttcaatcggcaactgcggataatcatggcgataacgggcgataactgcaggcagaatgtagttaccgatggtactactggcatagatacgaatcgcgccgttgtcttcgcgaaacagttgttcgatttcaaccgcctgttcaagcaatgccaacgcacgcggatagagcagccgcccgtgttcattaacaaccagtcttttccccacgcgatcaaacagttgcacgccaagctgcccttccaggtcggtcaaggctgcgctcactgcactttggctcaacgccagcatcacgctcgcctgggtggtacttccacttttcaatacttctgcaaaaacttccaactgccggagggtgatgtgcatagtcgcttaccacttataaagattaattataaatatataatcaattttatttttaaaccagttagtcgtaaccttatgcccggttaaaggagagggttatgacgaatatcaccttacagaaacaacatcgtacactgtggcattttattccggggttagccctgagtgcagttatcaccggggtcgccctgtggggtggttccattcccgcggttgcgggtgccgggtttagtgccctcaccctcgcaatcttgttggggatggttttaggcaacaccatctatccgcacatctggaaaagctgtgacggtggtgtgctgtttgccaagcaatatttattacgtctgggtatcattctttatggcttccgtctgacgttcagccaaattgccgatgtcggtatcagtgggatcatcattgacgtgttgacgctgtccagtaccttcctgctggcttgcttcctggggcagaaagtgtttggtctggataagcacaccagctggttgatcggtgccggtagcagtatctgtggtgctgccgcggtactggcgactgagccggtagtgaaagcggaagccagtaaagtaaccgtggctgttgcaaccgttgttatcttcgggaccgtcgcgattttcctctacccggcgatatatccgctgatgtctcaatggtttagtccggaaactttcggtatctacattggttctactgtgcacgaagtggcgcaggtggtggcggcaggtcatgccatcagcccggatgcggaaaacgcagcagttatttccaaaatgctgcgcgtgatgatgctggctccgttcctcatcctgctggcggcgcgtgttaaacagctgtctggggcgaacagcggcgagaaaagcaaaatcactattccgtggtttgccatcttgttcatcgtagttgccatctttaacagcttccacctgttaccgcagagcgtggtgaacatgctggtaacgctggataccttcctgctggcaatggcgatggcggcgctgggtctgaccactcacgtcagcgcgctgaaaaaagctggggcgaaacctctgctgatggcactggtactgtttgcctggctgattgttggtggtggtgcgattaactatgtgattcaaagcgtcatcgcataaaccactacatcttgctcctgttaacccgctatcattaccgttttcctccagcgggtttaacaggagtcctcgcatgaaatacattggagcgcacgttagtgctgctggcggtctggcaaatgccgcaattcgcgccgccgaaatcgacgcaaccgcgtttgccttgttcaccaaaaaccaacgtcagtggcgtgccgcaccgctcacgacgcaaaccatcgatgaattcaaagccgcctgtgaaaaatatcactacacaagcgcgcaaattcttccccacgacagttatctgattaacctcggacatccggtcactgaagctctggaaaaaagccgcgatgcctttatagatgaaatgcagcgttgcgaacagctggggctttctttgctcaacttccaccctggcagccatctgatgcagattagtgaagaggattgccttgcgcgtattgccgaatccatcaacattgcgctggataaaactcaaggtgtgacagcggtgatagaaaacaccgccggtcagggcagtaacttagggtttaaattcgaacatctcgcggcgattatcgacggcgtggaagataaatcccgcgtcggcgtctgcattgatacctgccatgctttcgctgccgggtatgatttgcgtactccagccgaatgcgagaaaacattcgcggattttgcccgtactgtcggctttaagtatctgcgcgggatgcaccttaacgatgcgaaaagcacctttggcagccgcgttgaccgccatcatagcctcggtgaaggcaatatcggtcatgatgcgttccgctggatcatgcaggacgaccgtttcgacggcattccgctgatcctcgaaaccatcaacccggatatctgggcagaagagatcgcctggctgaaagcgcaacaaactgaaaaagcggtagcctgaagatgaataaccgggaaaaggagatccttgcaattttacggcgtaacccgctgattcagcagaacgaaattgcggacatgctgcaaatcagccgtagccgcgttgcggcgcatattatggatttaatgcgcaaaggccggattaaaggcaaaggttacattctcaccgagcaggaatactgcgtagtggtggggacaatcaatatggatattcgcgggatggcggatatccgttacccgcaaagcgcttctcatcccggtacaattcattgcagtgcgggcggcgtgggacgcaacatcgcccacaatctggcgctgttaggccgtgacgtccatttgcttagtgtgattggcgatgacttttatggcgaaatgctcctggaagaaacgcgccgtgccggcgtgaatgtctccggctgcgttcgtttgcatggtcaaagcacaagcacgtatctggcaattgccaatcgagacgatcaaaccgtgctggcgattaacgatacccatctgctggaacagttgacaccgcaactactgaacgggagccgcgatttacttcgtcatgcgggcgtggtactggctgattgcaacctgacagccgaggcgctggaatgggtctttaccctcgctgatgaaatcccggtgtttgtcgataccgttagtgaattcaaagcgggcaaaatcaaacactggctggcgcatattcacaccctgaaacccactttaccggagctggaaattttatggggacaggcgatcaccagcgatgctgaccgtaataccgcagtgaatgcattgcatcagcaaggtgttcagcaactgtttgtttatttgcccgatgagagtgtttattgcagcgaaaaggatggagaacaatttttgctgaccgcgccagcgcatacgacagtagacagttttggtgctgacgatggttttatggcgggcctggtatatagctttcttgaaggatacagtttccgcgacagcgcccgttttgcggtagcctgcgcggcaattagccgcgccagcggcagcttaaacaaccctaccctgtctgccgataacgcgcttagtttagtgccaatggtgtaacaatgttgccggatgcgacgcttaacgcgtcttatccggcctacaaatcaggcaatttcagcaagtaaatgtaggcctgataagcttgcgcatcaggcaatgacactcaagctaaaccaataaagaacccggcaatggtcgcactcatcaagttggaaagcgtcgccgccgccagcgcccgtaaaccaagctgggcgatttccggcgcacggtgtggcgcaaccgcagaaaacgcccccaccaccaccccgatagaaccaaagttagcgaaaccgcacaacgcgaaggaaataatcgccacagttttagcatcgagagtgccagccgtttgcagatagggactgaaattgagataagcgacaaattcatttattgccagtttctgtccaatcaaactcccggcaagattcgcatcactccagtccacacccatcacccacgccagtggagccagcaggtaacctaaaatggactccaggctggcatgttcaaaaccaaaccagccaccaacgccgccgataataccgttaatcaacgcaattattgcaacaaatgccatcaccactgttgccacacctgcggcgattttcagcccggtcattgcccctgtcgcagcggcttcaataatgctttttggcggtgtttcggtgaaagagaggttattaaaggaaacctggctagattccgttgccgggcttaacaggcgggcaaacaagatcccgccagggatcgccattaaacttgccgccagcagatattccacaggcacgcccagtgcggcgtaaccaatcattgtgctaccagcaatgctggccatgccactacaaatcgctgtaaataattcattgcgattcagacgatcgataaagggtttgacgattgccggaatttcgttttgcccgaggaaaatggtggtgaccgcgacgaaactctcgatcttgctgatatttaatgctttctggaagataccgccgagaattcgaattaaaatccccatcacaccgatgtagtagagaatactcaccagcgcggtgacgaagataattgccggtaacaccctgaaaccaaagataaatcctgcaccatcaaataaggtatccattttcggtccgaccagagaaccgaagataaatgcgctacccgcgtcgctgtacgccatcactttatgcacgccaaaagcgactttttcagcgacccaacgccctggcggtaaccaaagcataatgccgccaatcacgacctgtaacactaacgccgcgccaacggtacgcaggctgatcttcttcttgtttacactcagtaaaaacgcaatcgtcagcaataccaccattcccagaacacttctcatgacatccatagtgattatctcttcatgtcatattgggcgacggctttctgcccatcagaaatagccaggcctgcatcttgcgataccggcccggcttgttatcaacacttaatgggttttgatgtagccgcgcacgcactcttcgactaatccccagaaccagtctgtatcaatagtgatgccgactttggtattggcgggcttgccaagaacgcccagctcgtcgcagacggtacgcccatagcaagggccactgttgacgtccacttcgacgtacatctcctgggttttaatgccatcagggttaatcagataaccgatgcaggtggcgtcgtgcaccgggccgccagcaaggccgtagttttcgaactgcgttttgagagtgaagttcatgatgtcgctgaacagctctccggcggggccgcctgccctttccatccgagcaatcacgtccggggtgcaaacggtctggttggtgagatcgaggcccatcatcactaatggaacgccggaggtgaacactacgcgtgcggcttccgggtcggcaaagatgttgaactcggcagatggcgtgaagttgcctgtaccgtaagcgccgcccattagcacaatttcacggattttgggcaggatcgcgggttgcatacgcattgccaccgcgatattactaagcggaccaaccggcaccagagtgatatcgccatcgcttgccatcagggtatcaatgatatatttcaccgcatgagtgctttctgcctggcgggtcagcggctcgaataccgggccatccagtccggtttcaccgtgaatattatcggcaacgatttgttgacgcataatgggctgcggcatccccgcataaaccggaacattaatctccagtttctggcaaacattcaggccattaattaatgttttatcaagcgtctgattacccgctacaatagtgatgcctaataaatctattgccggatgtttcgccgccatcattatagcaatagcatcatcatgacccggatcacaatccagaataatttttctcttttccattgtttatttcctctgtttccagttgcgttattttttctacagcaaagaaaattcgaccgggccgatgattgaatcttaacaacagcgtacgtatgctaaatatgagaaatctcatagcggataaacatcgtgaaagaaatccacaataatgatcttaagcagcaattgatgagtgaatccgcgtttaaggattgctttttaacggatgttagtgccgatacgcggctgtttcattttttagcgcgtgactacattgtgcaggaagggcaacagccgtcctggctgttttacctgacgcgaggccgcgccaggctttacgccacgctagctaatggtcgcgtgagcctgatcgatttctttgccgccccctgttttattggcgagattgagttaatcgataaagaccatgaaccgcgtgcggtgcaggctattgaagagtgttggtgccttgcgctccctatgaaacattaccgtccgctgttattaaacgacacgctatttttacgaaaactctgcgtcaccttaagtcataaaaattatcgtaatattgtttctttaactcagaatcaaagttttccgttagtgaatcgcctggcagcatttatattactcagccaggaaggtgatctttatcacgaaaagcatacgcaagcggcagagtatttaggcgtttcttatcgacatcttttatatgttctcgcgcagttcattcacgacggtttattaattaaaagcaagaaagggtatctcattaaaaacagaaagcagttgagtggactggcgctggagatggacccggagaataaattctccgggatgatgcagtaaaaattattttcaatagcgcgattgccggatgcaacgcttaatacgttttatccggtctacaaatcgagcattacgccagaccaataaagaacccggcaatagtcgcactcatcaggttggaaagcgttgctgctgccagcgcccgtaaaccaagctgggcgatttccggcgcgcgttttgggctaatagcgctaaatgcgccaacgacaacaccgatagaaccaaagttagcaaaaccacaaagcgcaaaggagataatcgcaatggttttcacttccagcgtgccgcccgtttgcaggtatggggagaaactcaggtaagcgacgaattcgttaatcgccagtttctgcccaatcaggctacccgcaagattggcatcactccagtccacacccatgatccacgccagcggtgccagcacatagccaaaaatactttccagagaggcattggcgaaaccaaaccagccgccaattccgccgataatgccgttgatcagcgcaataattgcgacaaacgccattaccaccgtcgccacaccagcggcgatttttagcccggtcatcgcaccgctcgccgccgcttcgataaagctttttggcggcgtttcgctgaagctcagattttcaaatgtgacctggctaggctcggttgccgggctaagaatacgtgcaaacaaaatcccgccagggatcgccatcaggcttgccgctaacaggtagtcaattggtacgcccattccggcataaccaatcatcatgctaccagcaatggacgccatcccgctacaaattgcggtaaacaactcgttgcgattcatgcgatcgataaacggtttaacgatcgccgggatctcattttgcccgaggaaaatagtagtaaccgcaacaaaagattcgattttgctgatgttgagggctttctggaaaatgctgccaaggatgcgaatcagcagccccatcacgccaatgtagtacagcagactgatgagcgcagtaacgaaaataatcgccggaagtacgcgaaaggcgaagataaaacccgcaccgtcaaacaggacatccattttcggcccaaccaggctaccaaaaatgaaggcgctaccggcatcactgtaagacatcactttatgaacgcctaatgccgcctgttctactgcccattttcccggtgggaagtagagcatgatgccaccaatagcgatttgcagcagcagtgcggctccaaccgtgcgcaaactgatgctctttttattcacactcaacagaaatgctattgccagtaacaccaccatccccacaacacttctcattatatccataatgattttcccttcatgccggtaaacccggcgtcagcgccaggttttggtatgcttgatgagtacgggcgacggctttctgcccgtcagaaattaacccgcgagacgctgatattctttggcaatttcgctcgccagaatggcgttgttgaacaccagctggatgttggatttcaggctgtcaccgccggtcagttcagcaacgcgcgccagcaggaatggcgtactttctttaccaatgactccctgagcttcagcttcagctaccgcctgatcgatcgccgcattgatagtgtgttccggcatagcaaactgttccgggatcgggttcgctaccacgaggccaccgttcagaccgctttgccatttcaccaccattgcacgggcaatttcgctggcgctgtcgagacgaatgctgacgtcaaacgggctggtgcggcagaaaaacgcaggcagcgctttagtctgatagccaattaacggcacaccgaaggtttctaaatactcagtggttaatcctaaatcgagaatagatttcgccccggcacaaacaacggtgacattagtatttgccagttcttgcaaatcggcagaaatatcgaaggtatgttccgccccgcgatgcacaccaccaattcccccggtggcaaatactttaattccggcaagcgccgcaataatcatcgtactagccacagtggttgcgccattttttccggcggcaacaacaaaaggtaaatcgcgacgactaactttggtcacgttatgcccttcacgacccagtaattcaatttcttctttgcttaaccccactttcatcacgccgccaataatggcgatcgtggcaggtacagcgccctgtttacgaatagtttcttcaacttcaattgcggtctgggcattttgtgggaacggcatcccgtgagaaataatggtgctttccagcgccacaaccggttttttgttttttaaagcgtcctgcacttccggggaaatttgtaataattcaggggaaatttttaattcagacattctgcgttctccactaagcttataacgttggcaatgcttaaatcggggttattggtgtattcacaggagagcgccatactgctacatccctgtgcgaaacgaacagattcggcaaacggcattccgtctacccaacagctagcaagtcccgccatcatggcatcgcccgctccggtaacattaataacattggttttgatcggcgcagaccagccactttcaccgctgatatcgctgtaataaacgccgtcgccgcccatgctcaataccagtcggttcaggccatgttgatggaaccaggcagcaacttttgccacatcttcacgcccactcagcgcaatcccactcagggtttccgcttcaaggcggtttggcttgagagtgtggatctgatttagacggtcgcgcactttgacacatttccatgcgctaaccggatcgacaaatacgggtacgttggcggcattatccagaatccatgccagtgcctcttcactgatattacagtccgcgacaatgacctttgccctctgaataaattcaccgtgctgtgcgagatattcagctgtaatagcgttgctaatattcatgtcatttatagcaaccagcatttcaccggtattatcgagtaaacttaaataactgctcgtattttctcccggcacaatcaggcatttatcgacataaacgccagattgattggtttgcgttagcaggctttgaccataaaaatcactgcctacggcgctcagtagccaggctttgttacccagcaacgccaggttttgtgcaatattgcgccctactccaccaggcgtaaattttattttacctggattactatccgcataatttaaactttcatgactatatccggcgacatcaatattcgcgctacctataattacgacataatccttttcgcgcatagcacgtcctctggtaaaaaattaccaaccctgtcaatccacaagaatatagatactgcaaagacggtttaaacatgtgttcatatttaaacatgtgctcatagtatgcatgttttacgtaaagtaaattaccgccagagaggcaaaatgggcagatttgagcaggctcacaaaatgcgattaaatgcctgaattacaaaagcgaggaatttgtgacgggatgcacagaacagaacaataaaaaagggcagaaaataatctgcccttgaggaaataacctgagtgtttgatgaacgtttgaagtttctactgaaagataaaaccatttaaattcataaaattacattcacaaaccggtcattctctttgcgctcatcaaatgttacaggacaggaaatttctgccctgtaacacaccttttattacgctgctttcgctactgcgtccacttccggacgtttcaggaaggcataggccaaacccgccaccagcgtaccggcaataattgctaccaggtaacccaataccggcgtaatagcgccagggatcagcagaacaaacagaccaccgtgcggtgccatcagtttcgcaccaatcgccatactgattgcgccagtcagcgccccacccacgatacagcacggcagcacacgcatcggatcacgagcagcaaacggaattgcaccttcgctaatgaagcacagtcccaataccagagcggctttgccaccttcctgctgcgctttgtcgaatttgcgacgcgccaccattgttgccagacccattgccagcggtggcaccatacctgccgccataatcgccgccatcgggccataggtttgagtactcagcagacccacaccgaatgcgtacgctgctttgtttaccggaccgcccatgtcagtacacatcatgccaccgaggatcgcccccagcagaaccgcattcgcagtccccatggtctgcagccagtgagtcagcccttcgagaatgccagcaactggtttaccgatcaggtagatcatcgccagaccgaccaccagactggaaattagcggaatgatcaggatcggtttcagcgcctccatactctgtggcagtttcaattgcgtactgattaacttcgcaatgtaaccagccaggaagcccgcaataataccaccaatgaagccagaaccggtgctgaccgccagcataccgccaatcagacccggagtgaggcccggacgatcggcaatggaaaaggcaatataacctgccagtaccggcaccatcagcgcaaaggcactaccaccaccaatctgcatcagcgccgcagccaacgtacccggctctttaaacgcttcgataccaaaagcaaaagaaagcgcgatacacagaccacctgcaacgaccatcggcagcatgtaagaaacgcccgtcagcaagtgacggtatgcgcctgcactctctttcttactttcagtggtcgccgtttgagctttgcccgccggttcatacggcgttgcttcagcaaccgctttatccagttcctgcgcggttttcttcagcgccagaccggtagaggtacgatacatcggtttaccagcaaatttcgccagatccacttcgatatctgccgccacaatcaccagatccgctgctgcgacttcttcgggagtgattgcattacccgcgccaacagaaccacgggtttcaactttcacccaccagccacgttttttcgcttcggtttcaatggcttcagccgccataaaggtgtgtgctacgccagtcgggcaagcagtcaccgcaactacgcgtttcggaccgctggcggcaactggtgctgtcgcagcgaccggcgcagtgtaaggtttcgcatggcctttggcttcactcaggaacagctcagggtgcgcaactgcccgggaaatatcgcccagccagacatttttaccgttcagcgcgctgtcgttcgggatggaatcaccgagaacaatcgccatttcagcgtcgttcggattgtcgatgatttccagttttgcttttcgcgccgccgcgcccagcagggtcttcgccatataggcgcgtgcctgaccgagattagcgtcaataatcagcagcgttttcattatgcctctcctgctgtcagttaaaaggttgtaagtcgacgcgcgccatcattgcggccaactgcggacgatcggtaatacccacattgctttgacttaccgccagggctgcaacagctgtcgccagacgcagtgtgtgttcactggattcacgcatcagcaagccataaatcaggccaccaaccatagaatcccctgcgccaacggtgcttacgacatcgacactcggtggtttggcgatccattcgccggaggcattaacccaaagcgcgccttcggcacccagactaataacaacatgcgcgatgccttgttcacgtagcgcatgtgcagcttcaatcacatctttcatttcaggcagtttacggcctgcccagatttccagctcgcggcggttaggtttcaccagccacggtgccgctttcaaacctgctactaacgcttcacggctactatcaaagataatgcaaggacactgactacgcaggcgagtcatccagtcggtgaacgcttccgggctgacgccactcggtaagcttccgctgacacagaccatatcgaactgaccgagccagctcagagaatcagtcacaaagcgttcccagtcggcgggggtgacttcaaaaccgctgaagttgaagtcggtcacttcgccgtctttttccgtcagcttaacgttaattcgggtgcgcccctgtacaacctggaaacggttggcaatgcccagctcgctgaacagttgctgaaaaccatcctgattgtctttacccaggaagccgccaacggtgacatcaattcccaggtcttttaatactttggccacgttgatgcctttacccgccgcatgcagaccggtggttttcaccaggttcacttcgccgcgttcaatttccgggcagaaaccaacaaggtcataagccggattaagggtgatagtagcaacacgtctgctcattatgcgccctccccaagaccagcagcgatagcgtcgccgattgctttcagcgcctgttcagcatctgcaccctgggcggtaaagcgtaggcgatgacctttcttaacgccaagtgccacaactttcatcagactacgtccgtttgccggtttgccggtaccatcaaggtttgtcacggtaatatcactgttaaattgtttaatggtattgaccagcatggtacctggacgagcatgcaggccgtgttcattgcgcaccacaaactccgcgcttaacacgtcgtcggtcggcgcatcatcgctggtcagcagcgccagcaacgttgccgcatccgctttcagcaagcggtcagctttattgtcgagcaataaatcagcgagacgcttaagaaccgcgatgggctgatcgtcattcatcgccacactcaccagcatggctgccgtttcgccgtccacatcaaaagcatttgccgcacggcttaccgcaatcgcgctacgcagattgccttcggcgctatcgctcagccagataccctgtccgagattcagcggttgttcattgatggctttggtgacgaaagtggcgtcaactgcccccgcctctttcagacgcgcagcgttcagcgcctgaagagtcagcagatcgctggcgacgatatccagtgtcagcatttcgttgtcgagcttcagctgctcactctgcttttcgcccatcagtaatgcgcgaagttcttctgctgttgttgcactcttcagttgttcagcaacggaatcatcgctcagtacgtgggtcagctggcgtagcaggcccagatgttcatcgctgctggcagcaataccgattgccacgtacgctacctgaccgtcaccccaggtgacgccttccgggaactgaaatacctgaacgccggttttcagcacctgatcgcgggtgtcggtagtgccgtgtggaatagcaataccattgccgaggaacgtactggtttgctgttcgcgcgccagcatgccattgacgtagccttctgctacattaccggcctgcaccagcgccgcagcgacctggcgaatcgcctcttctttgtctccggccttttcgcccggatggatgtcctgtacggataactggaacatagttctcctctcttgctgaattgaaacgattcagcctctatgagaaaaaaagcgccaacctggcttagggttaaagacaagatcgcgctgaaacgtttcaagaaagcataatacttctgtttcagcacgcaaggaaagccgtaaagttatgagcaaaagtttgatgtgctgcacaattttttgccatttttcctaattgctgatgggaaaatccgttatcagcaatttcatttcagcagcgtcagcagccaatcagcaacagtgaaatggcattttgactattcgtggcgcttttgatttcgctgtctgtttattttctgacaagcagcgtaaactccgcgtcttcctcttccagtgatcgaccagcatgcataactcccccgcagtctccagcgcgaaaagctttgacctgaccagcacggcgtttttaatcgttgcctttctcaccggtattgcgggcgctctgcaaaccccgacactcagtatttttcttaccgatgaagtacatgcccgtccggcgatggtgggattcttctttaccggcagcgctgtcattgggattctggtaagtcagtttctcgccgggcgctctgataagcgcggcgatcgcaaaagcctgattgtcttttgctgcctgttaggcgtgctggcctgcaccctttttgcctggaatcgcaactactttgttttgctattcgttggcgtctttcttagcagctttggcagcaccgctaacccgcaaatgtttgcccttgcccgtgaacatgccgacaaaaccggacgtgaggcggtgatgttcagctcttttttacgcgctcaggttagtctggcatgggtcattggcccaccgctggcttatgccttagcgatgggtttcagctttacggtaatgtatctgagcgcagcggtagcgtttattgtttgcggtgtgatggtgtggctgtttttaccgagcatgcgaaaagagcttccgctggcgaccggcacgatcgaagcgccgcgccgtaaccgtcgcgatacgctgctgctgtttgtcatttgtacattgatgtggggcagcaacagcctgtacatcatcaacatgccgctatttattatcaacgaactgcatcttcccgagaaactggccggtgtgatgatggggaccgccgccgggctggaaatcccgacgatgttgattgccggatatttcgccaaacgtctgggtaagcgtttcttaatgcgcgttgctgccgtgggtggcgtctgtttttacgcaggaatgctgatggcgcatagtcctgtcattctgttgggcttgcagctgctaaatgctatttttattggcattctgggcggcatcgggatgctctattttcaggatctgatgcccggtcaggcgggtagtgccaccacgctctataccaacactagccgcgtgggctggatcatcgcaggaagtgtggcgggcatcgtcgccgagatctggaattatcacgctgtgttctggtttgcgatggtgatgattatcgccactctgttttgcttactgcggattaaagatgtttaaggcgcggtcagcatttccagatcgataagccaggtcatggcctgctgacggctgttaccgcacatttcagcgctggcttgtaagcctgcacagactttcggtcgcagtgggctggtgaaaattttacagcgttgctgttcatcaagctgaatgcagggcgtattggcgggcttgccatctggcataccgggaatagggctggaaatactaggggcagtgcaacacgccccgcaacccggacggcattccatacgttgttctcttaaggttaaccaccggattgatgagcgcgcacagtaccaccttttttgcaccagcaaaagtgcgaataccacttgcccgaaaggcccgtcgcgagtactttgtcgcgatatttttgacattttcgactacaggaatttttcgatgccaagagcgaacgaaattaaaaaaggtatggtactgaattacaacggcaaactgctgctggttaaggatattgatattcagagccccactgcccgcggtgccgctacgctgtacaaaatgcgtttttctgatgtccgtaccgggctgaaagtagaagagcgtttcaaaggtgatgatatcgttgacaccgtgacgctgacccgccgttacgttgacttctcctatgtcgatggcaacgaatatgtctttatggataaagaagactataccccgtataccttcaccaaagatcagattgaagaagagttgctgtttatgccagagggcggcatgccggacatgcaggtgctgacctgggacggtcaactgctggcgcttgagctgccgcagaccgttgatctggaaatcgttgaaaccgcaccaggcatcaaaggggcatctgccagcgcccgtaacaaaccggcgacattgagcactggtctggtgattcaggtaccagaatacttaagcccgggcgaaaaaattcgtatccatatcgaagaacgccgttatatggggcgtgctgactaacttcagccgcatgcagaaaagggatagctcaggctgtcccttttttaatttattataccaatcttctattttgcgcttcctgaacaccttacgccctcaattttcactcgttgattgatcgccctcacacttcatcgcattaacaatccagaccaatttcaattgctgtcatataactttacactgtcgttgttaattaatcgttactaagacgtgactcctatgaatacaatcgcctccgttacgctcccgcatcatgtacacgctccacgctatgatcgccagcagttgcaaagtcgtatcgttcattttggctttggagcctttcaccgcgctcatcaggcgttactgaccgatcgtgtgctgaatgcccagggcggcgactgggggatctgtgaaatcagcttgttcagcggtgatcaactgatgagccagctccgcgcacagaaccatttatataccgtgctggagaaaggtgcggacggcaatcaggtgataattgtcggtgccgttcacgaatgccttaatgcaaaactggattccttagcggcaattattgagaaattttgcgagccacaggtggcaattgtttccctgacgattaccgaaaaaggctattgtattgacccggccaccggtgcactcgacaccagtaatccgcggattattcacgatctacaaacccctgaagaacctcactccgcaccgggtattctcgtcgaagcactgaaacgccgccgtgagcgcggccttacaccgtttaccgtgctctcctgcgacaatattcccgacaatggtcatgtggtgaaaaacgcggtgctgggaatggcagaaaaacgtagcccagaactcgccgggtggataaaagagcacgtcagttttccgggaaccatggtcgaccgcattgttccggctgcaaccgacgaaagtctggtggaaatcagccagcatctgggggtgaatgatccctgcgcgattagctgcgaaccgtttatccagtgggtggtggaagataacttcgtcgctgggcgtcctgcctgggaagtcgcaggtgtacaaatggtgaatgatgtcctgccatgggaagagatgaaactgcggatgcttaatggcagccactcttttctcgcttatctgggttacctcagtggattcgcccatatcagtgattgcatgcaggatcgcgcatttcgccatgccgccagaacattaatgctggatgagcaagcgccgacactgcaaattaaagatgtcgatttaacacaatatgcggataagttaattgcacgttttgctaatccggcgctgaaacataagacctggcaaatcgcgatggatggcagccagaaattaccgcaacgcatgctggcaggtattcgcatacatcaggggcgcgaaacggactggagcttgctggcattaggcgttgcaggctggatgcgttacgtcagcggcgttgatgatgccggaaatgccattgatgttcgcgatccgcttagcgataaaattcgcgaacttgttgcgggcagcagcagtgaacaacgcgtaaccgccctgctttccctgcgtgaagttttcggtgatgatctgccagataacccgcattttgtgcaggccatcgaacaagcctggcaacaaatcgtacaattcggcgcacatcaggcgctattaaacaccctcaaaatttaacgatttctgcggttaaagcggatgaagctcaccttcgtccgctctccccttctcttttctgccttttttagccaggattaacgctcagttaacttaccagagtattgcggagccgttgtgaccaggaccaacctcatcaccggttttctcggcagcgggaaaaccacgagcattcttcatctgttagcccataaagatcccaacgaaaaatgggcggtactggttaatgaatttggggaagtcggaattgatggtgctttgctcgccgatagcggcgcattgctgaaagagatccccggcggctgcatgtgctgcgttaatggtttacccatgcaggtagggttgaataccttactgcgtcagggaaaaccagaccgcttgttgatagagccgaccgggctgggccatccgaaacagatcctcgatctgttaaccgcaccagtctatgaaccgtggatagatctgcgcgccaccttgtgcattctcgatccgcgcttgctgctggacgaaaaaagcgccagcaatgaaaacttccgtgaccagctggctgccgcagacatcattgtcgccaataaatccgaccgtacgacgcccgaaagtgagcaagcgctacagcgttggtggcagcaaaatggtggcgatcgacaattaattcacagtgagcatgggaaagttgacggtcatcttctggatttgccgcgtcgcaatttagccgagttgcccgccagcgccgcgcattctcatcagcatgtcgtgaaaaaagggttagcagcgttaagcctgccagagcatcaacgctggcgtcgcagtctgaacagcgggcaaggatatcaggcctgcggctggatattcgacgctgatacggtattcgacaccattggcattctggaatgggcgcgacttgcaccggtggaacgcgtcaaaggcgtgctgcgtattcccgaagggctggtgcgaatcaaccgtcagggcgatgacctgcacattgaaacgcaaaacgttgcgccaccggacagccgtattgagctgatttccagcagcgaagctgactggaatgccttgcagagcgcgctgttgaagcttcgtttagcgactaccgcgtaaggttgcctgcgtttttcagtaagataattagagaaaatatgattaaaaatttgccgcaaatagtgttgttgaatattgtcggcctcgcgctgtttctttcctggtatatccccgttaatcatggattctggttgccgattgatgcggatattttttatttctttaatcagaaactggtcgaaagtaaggcctttttgtggctggttgcattgaccaacaatcgcgccttcgacggttgtagtctgctggcgatgggtatgttgatgctgagtttctggctgaaagaaaacgcccctggcagacgacgtatcgtgattattggtctggtcatgctattaactgcagtggtattaaaccagctgggtcaggcattaattcctgtaaaacgggccagcccaacattgacttttaccgatattaaccgcgtcagcgaactgctctctgttcccacgaaagatgccagtcgagatagctttcccggcgatcacggcatgatgctgcttatttttagcgcattcatgtggcgttatttcggcaaagttgcaggccttatcgcccttattatttttgtggtttttgcatttcccagagtaatgattggcgcacactggtttactgacatcattgtcggtagcatgaccgtgatattgatcggtttgccctgggtgttgctgacgccattaagtgatcgattaatcaccttttttgacaaaagtctaccaggaaaaaacaaacatttccaaaacaaataactcacagtaattaacatcatcagggttatttttatagtgaggataatcctgatgatgcgcaccgtgctttcatctatcgaacgcaaaaatcattctctaagtaaatgaatggattgcatgcgtttcactcaattgtactttaattgaccaaccccgcttattaactttctgtatcactttttcttataaaaaatcatgtaaaaccgctcgccaagaccgcaccaatcgggtaatctcgaactcgttttgcctcggcggtagattatcctcacagcatataattttgtgcgttagtccacagatttggccttaaggaattgtttcaacatgcccaggtaattagtctcgtgtcgcttggcatttttttataacgatatttgtcgttaaggacttcaagggaaaacaaacaacatggtcaaatctcaaccgattttgagatatatcttgcgcgggattcccgcgattgcagtagcggttctgctttctgcatgtagtgcaaataacaccgcaaagaatatgcatcctgagacacgtgcagtgggtagtgaaacaagtagtctgcaagcttctcaggatgaatttgaaaacctggttcgtaatgtcgacgtaaaaagccgaattatggatcagtatgctgactggaaaggcgtacgttatcgtctgggcggcagcactaaaaaaggtatcgattgttctggtttcgtacagcgtacattccgtgagcaatttggcttagaacttccgcgtagcacttacgaacagcaggaaatgggtaaatctgtttcccgcagtaatttgcgtacgggtgatttagttctgttccgtgccggtagtacgggacgccatgtcggtatttatatcggcaacaatcagtttgtccatgcttccaccagcagtggtgttattatttccagcatgaatgaaccgtactggaagaagcgttacaacgaagcacgccgggttctcagccgcagctaataaaccgtttggatgcaatcccttggctatcctgacgagttaactgaaagcactgcttaggcagtgcttttttgttttcattcatcagagaaaatgatgtttccgcgtcttgatccaggctatagtccggtcattgttatcttttaaatgttgtcgtaatttcaggaaattaacggaatcatgttcatacgcgctcccaattttggacgtaagctcctgcttacctgcattgttgcaggcgtaatgattgcgatactggtgagttgccttcagtttttagtggcctggcataagcacgaagtcaaatacgacacactgattaccgacgtacaaaagtatctcgatacctattttgccgacctgaaatccactactgaccggctccagccgctgaccttagatacctgccagcaagctaaccccgaactgaccgcccgcgcagcgtttagcatgaatgtccgaacgtttgtgctggtgaaagataaaaaaacattctgtagttctgcgaccggtgagatggacattccactcaatgaattgattccggcgctcgacattaataaaaacgtcgatatggcgatcttacccggcacgccgatggtgccgaacaaacccgcaatcgtcatctggtatcgcaaccctttgctgaaaaatagcggcgtctttgccgctctgaatctcaacctgacgcctagtctcttttatagtagtcggcaggaagattacgatggcgtcgccctcattattggcaatactgcgctatctaccttttctagtcgtttgatgaacgttaacgaattaaccgacatgccagtccgtgaaactaaaattgcgggcattcctctgaccgttcggctttatgcagatgactggacatggaacgatgtgtggtacgcatttttactgggcggcatgagtggaactgtcgttggcctgctctgctattacctgatgagcgtacgtatgcgccccggcagagaaatcatgaccgccatcaagcgcgaacaattttacgtggcgtatcaaccggtggtggatacacaagctttgcgagtaacgggcctggaagtactgctacgctggcggcatcctgtcgcgggagaaattcccccggatgccttcattaactttgccgaaagccaaaagatgattgtgccgctgactcagcacctgtttgagttaattgcccgcgatgccgcagaattagaaaaagtgctgccggtaggcgtcaaatttggtattaacattgcgccggaccatctgcacagcgaaagctttaaagcagatatccagaaactgctcacttccctgcccgcacaccatttccagattgtgctggaaattaccgagcgcgatatgttgaaagagcaagaagccacacaactcttcgcctggctgcacagcgtcggcgtagaaattgctattgatgacttcggcaccgggcacagcgcgcttatctatcttgagcgttttacgctcgattatctgaaaattgaccgtggatttatcaacgccatcggtacggaaacgatcacttcccccgtacttgacgcggtgctgacgctggcgaaacgcctcaatatgctgacggttgctgaaggggtcgaaacgccggaacaggcgcgatggctaagcgaacgcggcgttaatttcatgcaaggctactggattagccgcccgttaccgctggacgattttgttcgctggctaaagaaaccgtatacgccgcagtggtaaggtgtgcttacgtcccttattattcatagtgaaagcatgccggattgcggctaatgatgagtaaaaggaaatccgttgcagatgattgtgcgcatactgctgctgtttatcgctctgttcacctttggtgtgcaggcgcaggctatcaaggaaagctatgcctttgccgtgctgggcgaaccccggtacgcgtttaatttcaaccattttgattatgtgaaccccgccgcgccaaaaggtgggcagataacgttgagtgccctcggcaccttcgataatttcaaccgctatgcactgcgcggcaacccgggcgcacgcaccgagcagctgtacgacacgctatttacgacttccgatgacgaaccaggcagttattacccgctgattgctgaaagcgcacgctatgctgacgattattcctgggtggaggtcgctattaatccgcgcgcccgttttcatgatggtagccccattactgcccgcgatgtagagtttacttttcaaaaatttatgaccgaaggcgtgccgcaatttcgtctggtctacaaaggcaccaccgtcaaagccattgcaccgttaaccgtgcgcattgagttagctaaacccggcaaagaagatatgctgagtctgtttagcctgccggtatttccagaaaagtactggaaggatcacaaacttagcgacccgctcgccacgcctccgcttgccagtggtccgtaccgcgttacgtcctggaaaatggggcaaaatattgtctattcccgtgtgaaagattactgggcagcaaacttaccggtaaaccgtggacgctggaatttcgacaccattcgctacgattattacctcgatgataatgtcgcctttgaagcgtttaaagcaggtgcctttgatttgcgtatggaaaacgacgccaaaaactgggccacgcgttataccggtaaaaatttcgataaaaaatacatcatcaaagatgagcaaaagaacgaaagtgcccaggatacgcgttggctggcgtttaatatccaacgtccggtattcagcgatcgccgggtccgggaagctatcactctcgcctttgactttgaatggatgaacaaggcgttgttttacaatgcctggagtcgcacgaacagttattttcagaataccgaatacgcggccagaaattaccccgacgccgcggagctggtgcttctggcaccaatgaaaaaagatctaccgagtgaagtcttcacacaaatctaccagccgccggtatccaaaggcgatggctacgatcgtgacaacctgttaaaagccgacaaacttctcaacgaagcgggctgggtgctgaagggtcagcaacgcgttaatgccacaacgggtcagccactcagctttgaattattgcttcccgcaagcagcaatagtcagtgggtattgccgttccagcacagcctgcaacggctgggtatcaacatggacattcgcaaggtggataacagccaaatcactaaccgcatgcgcagtcgcgactatgacatgatgccgcgcgtatggcgggcgatgccgtggcccagttccgatttacagatttcctggagtagcgaatatatcaattccacttataatgcccccggcgtgcaaagcccggttatcgacagcctgatcaaccaaattattgccgcgcagggaaataaagaaaaattactgccgttggggcgagcactggatcgcgtattaacgtggaattattacatgctgccaatgtggtacatggcggaagaccgtctcgcctggtgggataaattctcccagccggccgtgcgccccatctatagcctcggtatcgatacctggtggtatgacgtcaataaagcggccaaactgccgtccgccagcaaacagggagagtaaatgggcgcttacctgattcgccgtctgttgctggtgatcccaacattatgggcgattatcaccatcaactttttcatcgtgcaaattgcgcctggcggtccggtcgaccaggccatcgccgccattgagtttggtaatgccggagtattacccggcgcaggcggtgaaggtgttcgtgccagccatgcgcaaacgggtgtcggcaatatcagcgacagtaattaccgtggcggacgcggattagatccagaagtgatcgctgagatcactcatcgctacggttttgataagccgatccacgaacgttacttcaaaatgctctgggactacatccgctttgattttggcgatagcctgtttcgcagcgccagcgtgctgacgctgattaaagacagtctgccggtttccatcaccctcggattgtggagcacgctgattatctatctggtgagcattccgttaggcattcgcaaagctgtttataatgggagccgctttgacgtctggagtagcgcatttatcatcatcggctacgccattccggcctttttgtttgccatcctgctgattgtcttcttcgcgggcggcagctatttcgacctgttccctctacgcggcctggtttccgctaactttgatagcctgccgtggtatcagaaaatcaccgattatctgtggcatatcacgctgccggtgctggcgacagtgattggtggctttgcggcgctgaccatgctgacaaaaaacagtttccttgatgaagtgcgcaagcaatacgtggtgaccgcgcgtgcgaaaggggtaagtgaaaaaaatattctctggaaacatgtgttccgcaacgccatgctgctggtgattgccggttttccggcgacgtttatcagcatgttttttaccggcagcctgctgattgaggtgatgtttagtctcaatggtctgggcttactgggctacgaagcgaccgtcagccgcgattatcctgtaatgtttggtaccttgtatattttcaccctgattggcctgctgctgaatattgtcagtgatatcagctatacgctggttgatccgcgtattgattttgagggacgttaatgagccgactcagccccgtcaatcaggcccgttgggcgcgttttcgtcataaccgtcgcggctactggagcttatggattttcctcgtcttgtttggtttgagtttgtgttctgaacttatcgccaacgataaaccgttgctggtgcgttatgacggcagttggtatttcccgttattgaaaaactacagcgaaagcgattttggcggcccgctggcaagtcaggctgattatcaggacccgtggctgaaacaacggctggaaaataacggctgggtactgtgggcaccgattcgctttggtgctaccagtatcaactttgctaccaataagcccttcccttctccaccctcccggcaaaactggctgggaacggatgccaacggcggcgatgtgctggcacgcattctctatggcacgcggatcagcgttctgtttggcctgatgctgactctctgttccagcgtgatgggcgtgctggcgggggcgctacaaggctattacggcggtaaagtcgatctctggggacaacgctttattgaagtatggagcgggatgccgacgctgtttttgattattttactttccagcgtcgtacagcctaacttctggtggctgctggcaattactgtcttgtttggctggatgagtctggtcggcgtggtgcgggcggagtttttacgtactcgtaatttcgactacattcgtgcggcacaggcgcttggcgtcagcgatcgcagtatcatcctgcgtcatatgttgcctaatgccatggtcgcgaccctcacctttttaccgtttattttatgtagtagcataaccaccctgaccagcctcgatttcctcggcttcggtctaccgctcggtagtccgagtctcggtgaactgctgttacaagggaaaaataaccttcaggccccgtggcttgggatcaccgccttcttgagcgtggcgatattattgtctttgctgatctttattggtgaagccgtccgcgacgcatttgatcctaataaggcggtgtaacatgacgcaaactctgttagcgattgaaaatttgagcgtgggttttcgccatcagcaaaccgtacgtacagtagtcaatgatgttagtctacagattgaggctggcgaaacgctggcgctggtgggtgagagtggtagtggcaaaagcgttaccgcgctgagtattttacgcctgctcccttccccgccggttgaatatctctccggcgatattcgttttcatggcgaaagcctgcttcacgccagcgatcaaacgttgcgcggtgtacgcggtaataagatcgccatgatttttcaggaaccgatggtgagcttaaatccattgcataccctggaaaaacagctttatgaagtgcttagtctccaccgcgggatgcgtcgggaagcggctcgtggcgaaattcttaactgccttgatcgcgttggtatccgccaggcggcaaaacggctgacagattatccgcatcagctctccggcggcgaacggcagcgggtgatgattgcgatggcgctgttaacgcgaccggaattattaattgccgatgaaccgaccaccgcactggacgtctctgtccaggcgcagattttacagctgttgcgcgaactgcaaggcgagctgaatatgggcatgctgtttattactcataacctcagcattgtcagaaaactggcccaccgcgtggcggtaatgcaaaacggtcgctgtgtcgagcaaaattacgccgctacgctatttgcaagtcccactcatccttacacacaaaagctactcaacagtgaaccgagtggcgatccagtgccgttgccagaacctgccagtacgttgctggatgttgaacagcttcaggttgccttccccattcgcaaagggattttgaagcgcattgtggatcataatgtggtggtgaaaaacatcagttttacgctacgagcgggtgaaacactgggtttagtgggcgagtccggttccgggaaaagtacgacgggactggcgctgctgcgactgattaattctcagggcagcatcatctttgacggtcagccactgcaaaatttaaatcgccgccagctgttacctattcgtcatcgcattcaggtggtatttcaggatccaaactccagcctcaacccacgactcaacgttttgcagattattgaggaaggcttacgggttcaccagccgacgctttctgccgcacaacgcgaacaacaagtgatagccgtgatgcatgaagtgggattagatcctgaaacacgccaccgttatccggcggagttctctggtggtcagcgacaacgtattgcgattgccagggcattaattcttaagcccagcctgatcatacttgatgaaccgacaagtagtctcgacaaaacggtacaggcgcaaatattgacgctattgaaaagtttgcaacaaaagcatcaactggcctatttgtttatcagccacgatttgcacgttgtccgcgcgttatgtcatcaggttatcatactgcgacaaggggaagtagtggaacaaggaccgtgcgcgcgcgtgtttgccacaccgcagcaggagtatacgcgtcagctactggcgttgagctgacgcttaaaaaggattgtagttactaaagggttcggcaattgccacaccaaaatttttcaatcggcatgttgcagcaaactcgtcctggcgatttacaaacaggcacggctcaccttcacactccagcacgctacatggaacttcgatgtcgcttaacgcctggcttagtttatacatcacgctccatgcattatcaccatccgggctaagcaatttaagcgccaccaggctgttgtcaccgcacggtccattttgcggaatcggttcaaccttgctacctgcgaaaccagcagaccagcgatagttctgcggcagtcgatggacgatactgagttgtaaactagtcacttattttccccggaagcacattcacttcacaatttgtttacatcaattttaacacatcatcaacaatccgtctttatacagatcgtaaagattgatgcctcgcctgcgtggcctctatggctctgatttaagtaatatctgcgggcgtggtcacgtttgcggggctatatgtacccgtttctgcgatctaactcaacctttttaactacaatgatgtgactttttacataaattgattttacataaaataaacatatatcgggggaatgatagatttgtggttgacatgcatcaacaaaggaagccttttagcttcctcgttgtgcaatagatcaccgttttttcggccgactggcgtacagacagaagagaatggagctggttgcgcagaatgcaatactccaaatcatcggccatgcagagttaaaggtcgcaagagaaagcaatgcgccaacaattgcccctatgccaaaacggaaggttcctgccaggctagatgccgttcccgccatatggggaaactcatcaagaatgaccgccatcgcattggaactcaccatgctcacgcagcccacaaacgccgcaacgccaaccaccaggctccaaaatcccagccccagcagcgcactgatgaccatccacgctgccataataaattgtatccacaacccgctgcggaacatatttaacgcgccaatgcggcggacgaagcggctgttaaagatggtcatcacgaacagaaaaacaatgtttagcgcaaagtaataaccaaagttttccggcgcgacgtggttaatttcaatataaacaaacggtccggcgcttaagaaactgaacatcccggcaaagctgaaaccactggcaagcatgtagctcaggacacgtttatggcggaacagcgccgcaaagttaccaatagtggtacgaatgtgaaatggctgacgacgctccggtggtaaggtttctttaatcaggaagaaaatcattgcgctagccagaatcgccgctaatgccaggatccagaagatgtaatgccagctcagccacaccagcacccagccgccaactatcggtgccatcagcggtgcaatggttgtcaccagcatgacaaagctcatcatccggctgaactcttctttcgggtaaatatcgcgcatcagggcgttaatgaccacgctggccgcagccgcagccagcccgtggaagaaacgcatcacaatcagctgatcgatggtgtttgccaacgcacacgccaccgcggcggcggcaaacaccagcgtaccgccgagcaccaccggcttacgcccgaagctgtctgccatcggcccgtagattaactgccccaacgcaaagcccagaatataagtactgagggtcatctgcgtactgcccgccggtacgccaaactgcgcactaattaccggtagcgcgggcagatacatatcaatgctcagcggcatcaacatggccagcaggccaaggataaaaacaatagcaaagctgctatgctgtcgggtggtcacaacgggctcctgaaagtcattgaaaagttagacgacgctggcaatttcttcttcagttaacggacgatattcaccgggggctaaatcagcatccagcgtaataccgccaatacgttcacgatgcagctcaaccacgtggttacccacggcggcgaacatgcgtttcacctgatgataacgcccttcgctgatggtcagacgaacctgcgttggggtaatcacttccagcaccgcaggcttagtgagatctttttcgttatgcagctgcacgcctttagcaaattgctctgccgtatcgtcagctacaggactttccagtgtcaccagataggtcttctcgcaatgatggcgcggagaagtaatgcggtggctccactgaccatcatcagtcatcagcaccagaccggtggtatcaatatccaaccgccccgccgcatgcagtttccacgctaccggttcatcaagaaaatagagcaccgttgggtgatcagggtcgtccgtggagcaaacatagccctgaggcttattgagcatgaagtaacgtggaccgtgttgctgcgccagcgggttgccatcgtaagcgacatcatgttcaggaagcagtttgaacgctgcattacggacgatttcgccatcgacggtgacacgattgccgcggatttcacgcccggcaatagcacggctaacgccgagttgctgtgcgataaatttatcaagtcgcatgtgtgtgattttgcctgtaaaaacggaggtcgggcattgacccgaaaatctgaactgttgtctgcccagtatagcggtctaataacatccctcaagggaaaaagatccatggcatactattagcagaataatctacctacgcgagaccatgatttttacacttcgcccatatcagcaagaagccgtggatgccacgctcaaccattttcgtcgtcataaaacccctgccgttatcgtgctgcccaccggcgcaggtaaaagcctggtgatagcggaactggcacggctggctcgtggtcgcgtgctggtgctggcacacgttaaagaactggtggcgcaaaaccatgcaaagtatcaggcgctggggctggaagccgatatttttgccgccgggctaaagcgcaaagagagccacggtaaagtggtatttggcagcgtgcagtctgtcgcccgtaatcttgatgcctttcagggtgaatttagcctgttgattgtcgatgaatgtcaccgtattggtgacgatgaagagagccagtatcagcaaatcctcactcacctgacaaaagtgaatccccacttacgcctgctggggctgactgccacgccttttcgattgggcaaaggctggatctaccagtttcattatcacggcatggtacgcggcgatgagaaagcccttttccgtgactgcatttatgagctgccgctgcgttatatgattaaacacggctatctgacgccgccagaacgactggatatgccagtagtgcaatacgatttcagccgcttgcaggcacagagtaacgggctgttcagcgaagccgatctcaaccgtgagctgaaaaaacaacaacgtattaccccgcacatcatcagccagattatggagtttgctgcaacgcgcaaaggggtgatgatttttgccgcgacggttgaacacgcaaaagagattgtgggattactgcctgccgaagatgcagcactgattactggcgacacccccggcgctgagcgcgatgtgttaattgaaaattttaaagcccagcgttttcgctatctggtcaacgtcgcggtactgaccaccggatttgacgccccgcacgtcgatcttatcgccattctgcgccctaccgaaagtgtgagtctttaccaacaaattgtcgggcgcggtctgcgtctcgctccgggcaagactgattgcttaattcttgattatgcgggtaatcctcacgatctctacgcgccggaagttggtacaccaaaaggcaaaagtgacaacgttccggtacaggttttctgccctgcctgcggttttgccaacaccttttgggggaaaacgaccgccgacgggacattgattgaacactttggtcgtcgctgtcagggatggtttgaagatgacgacggtcatcgcgaacaatgtgacttccgtttccgttttaaaaattgcccgcaatgtaacgcggaaaacgatattgccgcccgccgctgccgcgaatgtgacaccgtactggttgatccggacgatatgttaaaagcggcgctacgactgaaagacgcgctggtattacgctgtagcggcatgtctttgcaacatgggcacgacgagaaaggcgaatggttgaaaatcacctattacgatgaagacggcgcggatgtgagtgagcgtttccgtctgcaaacacctgcccagcgtaccgccttcgagcagctttttatccgcccgcatacgcgcacaccgggcatcccgctgcgctggatcaccgccgccgatatcctcgcccagcaagccttattgcgacacccggattttgtcgtcgcccgcatgaaaggccagtactggcaggtgcgtgaaaaagtgttcgattacgaaggtcgttttcgtctggcgcacgaattacgcggttaatggtagttttgattgatgtataaggcgattgagtatagaatctcgcccgcttttgcatacgcaaagcagatcacttacctgttgctgggtcgcctgtagcaggattaatttaagagagaaagaaatgtttactatcaacgcagaagtacgtaaagagcagggtaagggtgcgagccgccgcctgcgtgccgctaacaagttcccggcaatcatctacggtggcaaagaagcgccgctggctatcgagctggatcacgacaaagtcatgaacatgcaagctaaagctgaattctacagcgaagttctgaccatcgttgttgacggtaaagaaatcaaagttaaagctcaggacgtacagcgtcacccgtacaaaccgaagctgcagcacatcgacttcgttcgcgcttaattgctgaataagttgtaaaaaaccccgctccggcggggttttttgtatctgcagattatgcctgattacggtattgctattttttgcaggccagataaggcgttcacgccgcatctggcattcagaacacaaaaccgattaattgccgccagacgtccggcgctgcaattggtcgcgcaaattcggcggcgtgcctttaatggtcaaggtatcggttgctggatcccagaagatgcgttcacctaacagcatcgcatcaaagttaatagtcaagccaccgccgctaccggcaaacttcgtcaactgacgcagtgtgctacggtctgccgggaagctctcttccagttcgtagcctttttcagccgcaaactccgtgaagctcacttcgcttacgcctgccagctctttgctcaggcttttcagttcgatctcttcgcctgcctgcagctgctcattacagtagctataaacctgctggcgcacgttctgtcgctctgctttatccagttgtgcttcggcagtgaaatcatcaaccgcttgcaacagcccacggttttgcgctttcgcgtttaacccttcgctggccccgaggaaatccataaagaaatccgccactttgcgccctactcgccctttcaggaaagtgagatagcgggtggactctggattggtttcccattcggttaaatcgatacgcgcaacaatatccgcatgattgatatcaagataatgggttgggttgatgtcgagattttcgttaacgcgcatactgctcaggttgctcagaactgccaccagcaaatactccaccgccagatagcgatagtggcaaaacagcacgaatccaccgtcagcaaaaggatatttcgctaattcgtcacgcaggcggccggttgccgcgcggctaaatgccaggaagtcctcttcgccctgacgctgtaagcgcagcgtctgcgccagttcactctcttcgctaaacaagccgtaagctttatttttggcgctatagacccgatgcagttctgccaccatctcaacgacggtttctgtcggttccagcaaactatcgcgcaacaccagctcaaggttctgctcatcacgcttgataagctggtgcagagcaatctggttgatatccagactcatgataaactctcctttaagaccgggcggtattcaaccaccgccggttaagcgacgcaataaaagatggcggtcattttacagaaggcagcgtaacgagaatgatttaacgcataaaaaagcagaaaaaaaaccgttgctacggtaatatgttgccctttcatcaactaactgatttcgatttatgccacaaatttcccgctacagtgatgaacaggttgaacaattgctcgcagagctgctcaacgtactggaaaaacataaggctccgaccgacctttccctgatggtgttaggcaacatggtcactaaccttatcaacaccagcattgccccggcccaacgccaggcaattgccaactcttttgcccgcgccttacagtcctctatcaacgaagacaaagcgcactaagggaaacagataacaggttatggtaactcatcgtcagcgctaccgtgaaaaagtctcccagatggtcagttgggggcactggtttgcactgttcaatattctgcttagcctcgtcattggcagccgttacctgtttatcgccgactggccgacaacgcttgctggtcgcatttattcctacgtaagcattatcggccatttcagcttcctggtgttcgccacctacttgctgatcctcttcccgctgacctttatcgtcggctcccagaggctgatgaggtttttgtccgtcattctggcaacggcgggaatgacgctattactgatcgatagcgaagtctttactcgtttccatctccatcttaatcccatcgtctggcaactggttatcaacccagacgaaaatgagatggcgcgcgactggcagctgatgttcatcagcgtgccggttattttattgcttgaactggtgtttgcgacgtggagctggcaaaagctgcgcagcctgacgcgtcgtcgacgcttcgcgcgcccgctggccgcattcttatttatcgcctttatcgccagccatgtggtgtatatctgggccgatgccaacttctatcgcccgatcaccatgcagcgcgctaacctgccgcttagctacccgatgacggcgcgacgttttcttgagaagcatggtctgcttgatgcgcaggagtatcaacgccgtcttattgagcaaggtaatccagacgccgtttccgttcagtatccgttaagcgaactgcgctatcgcgatatgggcaccgggcagaatgtgctgttgattactgtcgatggcctgaactacagtcgcttcgagaagcagatgcctgcgctggcaggttttgctgagcaaaatattagcttcacgcgccatatgagctccggcaacactacagacaacggcatctttggcctgttctatggcatcagcccgagctatatggacggcattctgagcacccgtacgcctgcggcattaattactgcgcttaatcagcaaggctatcagctggggttattcagtagtgatggctttaccagcccgctgtatcgccaggcattgttgagtgatttcagcatgccgagcgtacgcacccaatccgacgagcagaccgccacgcagtggatcaactggctgggacgctacgcacaagaagataaccgctggttcagctgggtttctttcaatggtactaacattgacgacagcaatcagcaggcatttgcacggaaatatagccgggcggcaggcaatgtcgatgaccagatcaaccgcgtgctcaatgcactgcgtgattctggcaaactggacaatacggtggtgattatcactgccggtcggggtattccactgagcgaagaggaagaaacctttgactggtcccacggtcatctgcaggtgccattagtgattcactggccaggcacgccggcgcagcgtattaatgctctgactgatcataccgatctgatgacgacgctgatgcaacgcctgctacatgtcagcacacctgccagcgaatatagccaaggtcaggatttgttcaaccctcaacgccgtcattactgggttaccgcagcggataacgatacgctggcaattaccaccccgaaaaagacgctggtactgaacaataacggtaaataccgcacttacaacttacgtggtgaaagagtgaaagatgaaaaaccacagttaagtttgttattgcaagtgctgacagacgagaagcgttttatcgctaactgattaattataaatcagttagcgaaatatcttacttgcaatcggtgtggaaaacggtagtattagcagccacgagtcggcacgtagcgcagcctggtagcgcaccgtcatggggtgtcgggggtcggaggttcaaatcctctcgtgccgaccaaaaatcccaagaaaaaaccaacccttacggttggtttttttatatctgcaattaattcgataaacagaccgtgacacatcacagcctgtttattttctgttatcagaacgtcctgagctttcatcctatgaaattaattgctgttaaaagcattgggtacagaaaatacccatagctccatacccggagtcagtttttaaaaactgtttaaagaaatgcacaagtattgtgattgattttttagttgtttttcttgatgagaagctgatgcaaaattccgtctttataatgaaaatgatgccaaagcgaacgacaaggttgtagttttcactacatgtccatacataaaatggggtaacattcacgcgcctggtagcgttaccaacgctacgctcaaacataatgattctaataaaacctcaggagactactatgcctgaagcaacaccttttcaggtgatgattgtggatgatcatccacttatgcgacgcggtgttcgtcagttactggagcttgatcctggctctgaagtggtcgccgaagcgggcgacggcgcgagcgctatcgatctggcgaatagactggatatcgacgtgatcttgctggatctcaatatgaaaggtatgagtggcctggatactctcaatgccttgcgcagggatggcgttaccgcgcaaattattatcctgaccgtatccgatgcctccagcgatgtctttgcgctgatagacgcaggcgcagacggttatctgttgaaagacagcgacccggaagtattgctggaagcgattcgtgccggagcgaaaggcagcaaagtctttagcgaacgcgtcaatcagtacttacgtgaacgtgaaatgtttggcgcggaagaagatcccttcagcgtgctgacggagcgcgagctggatgttctgcacgagctggcacaggggctgagtaataaacagattgccagcgtgttgaatatttccgagcagacagtaaaagtacatattcgcaatctgctgcgtaaactcaatgtccgcagtcgcgtggcggccaccattctgttcctgcaacaacgcggggcacaataaaaatagcccgatggatttatcatcgggctgagatttatgacaaacgcaaaactgcctgatgcgctacgcttatcaggcctacgtggatcgatcaatttattgaatttacacaattttgtaggccggataaggcgttcacgccgcatccggcataaactaagcgcactttgtcaacagtctagcccgatggcatcaccatcgggcctctttttatttactctcctgcgggctcaaatgttgcatcgcctgcgcgatactacgttcaatcaccgcacggcgagtatcgttggcaggtaagagtttcaacatcatctcccacgcggcaacggcttcgccaaatcgctgctgctcaaaggcattaaacgcatacatgcttagcacacggatattgctatggtccgttctcaccagctgacgtagcagttcaccgccgaggcggttgtcgttgggatcagaactacgagtcaacgcttcagcgtatcccagtgcagcatcactgtttttcggatcgaggcgatacgcagtggcgtatgcatcggtggcgatactggcgttacccagcgccatgccaacgcggcccaacataatccagccttctatatctcccggatttttttgcagttgagtacgcatccccagcgcaagacggctcatctcttcttcgttgagcggatcggctttcggatccagcgccctgtccagcaacgccggagcctgtgccgtggcctgctgccagattttcacctgctgataattgccagtctggtagtagctgacgccagccacaattaacgccaccacaatacccggcagataaacaacatatccggcacgcttaccttccggcacgctttgttcaggaaacgcttccggcaccacgcgtacccgacgccggctgcgggcgtatatgacccaaccgccaatgccaatagccactactggcagcacccacagcagcacggtcagcggcgttaacggcggatcgtaagtgacgaagttgccgtaacgcgccaccatataatcgacaatctcttttttacttttaccttcctgcatcagttcatacactttctgacgcaggtcggtggcaatcatgctgttggaatcggcaatgctgttgttctggcatttcgggcagcgcagttcttcagtgagctgacggaactgttgttcctgtgcttcatctttaaactgcaacacatcgatggtcgccagcgcactgccggagatcatcagcatcagcacgcccaataaaaacctcattgtgcggcctccttactgtatttctcccacagcggcttgatctcttcttcccagacgcgaggattcagatcgcccgcatggcgatagcgaatgatgccgttgccgtcaataagaaacgtttctggcgcgccatagacaccgagatccagccctaacatgccatcgccatcaaacaggcttagcgcgtaaggattgcccagctctttcagccagctgattgccttctggcgatcgtctttatagttcatgccgaccacgcggatgccctgcgcagaaagctgattcagatattgatgttccgcacggcaggtcggacaccaggtcgcccagacgttaagcagtactggtttgccctgagtcagcacatccgcctgataaaactgccccggattgtccagactttcgagacgaaacttcggcacaggcttgccaatgagcgcgctttccagattggtcggatcatccccttcggcattacgcgccagctgccacagcagcgccgcggcaatcgccaggaagataatcaacggaattaacaatactttgcgcttcatacggcctccggcgcagttttttgcggactcacgcgcttacgatagcgaggatcaaacagacacagcagtccgcccaacgccatcatcagcccgcccgcccaaatccagcgaacaaatggtttgtagtaaagacgcacggcccacgcgccgttttccagctcttcaccgagggccgcgtacaggtcacgcgtgatgccgccgtcaattgccgcttcggtcatcatgctcccggcagtgttgtaataacgtttttccgcatacagcaccgtttccggcttgccatcgcgcgttacgccgatagtcgccacaccgccacgccagttcgggccagtcacctctttgacatcacggaaggtgaagcgatattcatgaatatcgacgctatcgccggacttcatgcgcacatcacgctcaacgctatagttctggctaaaggcaatgccaacaattgtcactgccagcccaaggtgagccgccaccatcccccaataactgaaggtggttttcgtgccgcgactaatacgtagcgcagcttccgcaattgccagcaccgcaatccagcaggccattgccaggccgagcaccgtcatcgccacaactttgctttcgaacagccacggcaacagcaggctcagcaccagcgtagagatgaaggcgataatcaataaattgcggatcttacgcgggcgatcccgcccccagcgcaccagaggaccgacaccaagcagtagcgcaaacggcaccatcagccaggtaaacatggtgttgaagaacggttcgccaatgctaatactgcccagtcccagttgcttatgcaccaacggcagcagcgtccccagcaacaccaccagcatcgcagcgaccagcaaaacattgttcgctaacagcaaagattcccggctccacagcgcattgtttacgcgactgcgaactttgtgtccacgcgcggcaaacagcagcaggctaccgccaatcaccagcaccataaaggcgaggataaacataccgcgcgccggatcagacgcaaacgcgtgtacgcttaccagcacgccggaacgcacgaggaaagtccccaacagacacaagctgaaggcactgattgccagcagtaatgtccacgctttgaagctggcgcgttgttcagtgaccgccagactgtgcatcagcgcagtccccaccagccacggcataaagctggcgttttctaccggatcccagaaccaccagccaccccagccgagttcgtaataggcccatgcggaaccgagcacgatgccgagcgtcaggaagatccacgctgccagcgtccacggacgagtaaaacgcgcataagtgctgtccagacgcccgctcagcaaagaagcaatggcaaaagcaaacgccacgctgaaacccacgtaccccatataaagcagaggcggatggaagatcagccccggatcctgcaatagcgggttaagatcgcgaccttcaatcgggaagttcggcaacgtgcgagagaacgggttagaggtaaagagaatgaacagcaaaaagccgacactgaccatccccattatcgccagtacacgggccacaatatccagcggaatacgctgactaaaaatcgccaccgcaaaggtccagccgctcatcagcagcacccacagcagtaggctgccttcatgcgcgccccaggtagccgccacgcgataccacaccggaagctgggtattggagttgctggcaacataggtgacggtgaagtcgttgaccacgaaagcattgaccagcaccagaaatgcgccagccacagacataaacagcagccaggcaaacaagcgggaagacgccatcatgcgcgcatctccgcgcgccacgccccatagcggatacacggacagcagcagcgcaattcccagcgccaggcacagcagtccgttaccaatttctggcatcatgatgctgggtccttataaacttacgtcaacttgctgggtccttataaacactcgccgggcgacggtggttagcttccatcgctttctcaacttctggcggcgtatagttttcatcgtgtttcgccagcacttctttcgcgaggatatgattgcctttttccagttcgccctgcaccacaacgccctgcccttcacggaacagatccggcaaaatgccttcgtaagagacatccacactgccttcagcatcgtaaatggtgaaggtcactttcaggctattgggatcgcgctgcacactacccggcatcaccatcccgccaacgcgcagacgctgaccgacttccggcatttgctgagtttcacgcttgccgtagagaatttcccccggcgtataaaagagatcgatattgctgcgcagcgcatatagcaccagaccgatagtcagcgccagccctgccaacacggcacaggcaatccacaagcggtttttacggcgaatattcatgcagcctcctgctgttgcgcagcacgtaaacgcgcctcacgcgcccgctgttgcgccacgccacgcagaattgcgcgatgttgcatcacgctgtgcacgaccaaaaccaccagcggaataacggtcatcaccaccgccagccagacaaaaaaggcgtaaccgcccattgcgaaaaattcattccaggaagcaaatgcaggggtcatttacggcctcttttcagtatcagttcactcacccacggacggcgtttttccatcagcaaaatcaaattacgcatccgcatcagcgtcagcgtggcagacaggagcaggaagccaaaaatgctccagcgcagcgggctacgcatcgccggatcgatactttgctgcatccgcgtacttccctgatgcagggtgttccaccactccacggagtaatgaataatcggcagattcaccacgccaatcagcaccaggatacctgccgcacggcccgccagacggcggtcgtcgaaggcgtgccacagggcaatcacacccacatacaaaaacagcagcaccagttcagaagtcagacgtgcatcccatacccaccaggtgccccacatcggttttccccatgcagagccggtaaccagggcaataaaggtaaacacggcaccaatgggggccatcgccgccaccgccaggttggccattttcatctgccagacaaggccaataaacgctgccactgccatacttgcataaatgcccatgctccagatcgccgcaggcacatgcaggtagataatgcggtagctatttccctgctgataatcagccggagcaaagccgaatccccagatccagccgacggtaagcacgaccacactggcaattgccagccacggtataaaccagccacagatttgatacagccgtggtgggatcgccagttgatgcagtgttttccacatagtttcgataccagactcgaacaaaaatcagtaatccagcgttattgaatgctgattcgtaacgctgccgccgtcgcaaaaggacttaatgtcgcggtgcctgccagcaacgcgcctaaaattgccagatacccgtcaacgggcaaatgcatagaagccgcgtccatcgcggcggtggcaaagatgagtaatgggatagtcagcggtaacaccagtatgctgagcagcacaccaccgcgcttaagtcccactgtcagcgccacgcccggtgcaccgagaaagccaagcgtaggcgttcccagcagcagcgtcagcgccatcacttgccagccataaacatccattcccagtagcattgctaccagtgggctaaggatgagtaacggcagaccggttaccatccagtgcgccatcaccttcgccagcacaacggcgggcaagggtaacggcaacaacatcaattgttcaagactgccgtcctgcaaatcgtcacggaacagtcgttccagcgccagcaaggaactaagcagcgcagcaacccagataatgcccggtgcaatacgcgccagcagttgcggctccggaccgatactgagcggaaaaagggtaattacaatcaggaagaaccacagcgggttggcgatttcggcgctatggcgaaacgctacacgcagctcaagacggaaaatgcgccagaacatcatgcggccctcgtttgcgtcagactaatgcggcgaattttactttcagcaacgttgagcggctggtgggtagtcagaatcacaatccccccctgctccgtatgctgcgccatacgctgggtcagacgatcgacaccgttaacgtcaatcgcggtaaaaggctcgtcgaggatccataacgtggcacgggtcagccacagacgcgctaaagcgacgcggcgttgttgcccggcgctgagctgatttacaggaatatcttcgaatccggcaagcccggcctgcgccagggcttccagacattgtgcggtatcgccatcgcgatgataaaagtgcagattttctaacgccgtcagccgggttttgatccccggctgatggcctatccataacaggttttgatggtagctgtcgcgtacctgatgcaagggctgcccttgccagagaacctcgcctgcgtcagggcgagacaaccccgtcagcaaacggagaagcgttgtcttccccgcgccgttgctaccggtgatttgtacccactctcctgcgttcagcgtaaaactcaagccactaaataaggttcgttcatcccgctcacaaagtaactctctggcttcaagcatacccacgcaataaccctgttaaaaacctggctcgacttcacgcatatcgggcagcttgtgcgctatccctttatggcaatcaatacaggtttgcccatctttcaccgcctggtcatgcatcttcgcggcaacgcttttctgggcggttgtatccatatactcgaagttgtgacagttacggcactcctggctgttattgtccttcatgcgccgccactcattctgtgccatcgtcagacgatgagcttcaaatttctgcggcgtgtcaataacgccaaaaattttaccatacagctctttacttgctttgagcttgcgtatcatcttcggcacaaactcgtgcggaacgtgacaatccggacaggtcgcacggacgccgctacggttgttgtagtgcacggaatccatgtattcctgatacaccgtgttgcgcatttcgtggcagctaatgcagaactcttcggtattggctttttccatcccggtgttaaagccaccccagaagacgatgccgccaacaaaaccgatcaacagcagcgtccccagcgccagacggctgggggtacgccaccatttccacaggcgcttaatcagaccaggcttacggtcagaatttcccataataacctcttatttcccgtaacctttacttggggtaaaggtattccccacgattggcgcggtatcggcctgcggtacgtgacattgcagacagaaataacgacgcggagccacttccgcgcccactttgccgtcgctgtccataaagtgagtaggactgatacgcggcgcgccagtggtgcgatagctttcgacaccgtggcactgcaagcagcgattggtattggtcgttacctgataaccttcaacgctatgcgggatcattggcggctgattcacatagttcagcggcatccgatcctgctcttttggcatccgaatggccccttcctgtgtcccggatacttccgggctctggctaaaatcgacgccattagccgcccaaaccgcgccgcttaccaccagggccagcatcgccgtccattgacacagcgctttcttcaggtcatggcttttcatgatttcgctcccgaactccattatgtcaacttttcgctccgctactccatcgtgtagttattgtaaatacatcctcagaacagacatccacgcagcgaccgcacgtcatgcaatcgcggctggtgacctgcaccgggctttgttcatccagcaccggggcacgtagcacatgcggttccgggcaaacatgaaaacaatccatacagcggttacatttctgccgatcggtggccgcaacggtaatcacacctttgctacccagcacgccatacagcgcgccaaccggacaaatgtgcccgcaccagccgtgttcaacgaccagtagatcaaataaaaacagcgcgagaataagcagcgcgccgctgccgaagcccattaccaggctacgccccatcagagaaacggggttgatccattcccaaatgagcgtgccagttaaggcacttcccaccagaatgaccaccaacagcacgtagcgaatgtggcgagggatcgtcgcagactgattgaggtcaaagcgcctgcgtaaccagttcgctaagtcggtaatcgggttcagcgggcagacccagctgcaaaataatcgctttcccgccagggcgtagagcacggtgataatcaccgcaccggtcaacgccaccgtggcaggcagatgaccactggcaagactttgcagcgtcatcagcggatcggtcagcggaacggtgtcgaataacaggctactgctgtagttgccgtgcaagatccacacaccaaaccatggaccgctcaaaaacatccccagcacgaagaactgacaaaggcgacgtaacaccagccaacggtgactgcgccaccagccttttttctccagcgcctcgcgcccggcgtcacgtttacgatttgccattgttcccctccagccagccgttacttagcttttgccattgttcccctccagccagccgaagcggtaatggtgacctaactcccctttcgccagactcagcggtaacaccttgattgccggttgttccagcacgcatactttttcgcacttaccgcaaccggtacaggcgtcgctgtgaaccgtcggcagaaagcgggcgtgcttaccggtacgcgtgttgcgctccagctccagggtgatggcctcatcaattttcgggcattcgcgataacaaacatcgcagcgcagcccctgaaagttgagacagttttcctggtccaccagtaccgccagccccatccgcgcgtcgtcgatgctttcaatctcacgatccagcgcaccgcttgggcacactttggcgcacggaatgtcctcacacatttcgcaaggaatatcccgtgcgacaaaatatggcgtgcccgcgctcagaccagaggccagcgtcgccagttttaaggtgtcgtaagggcaagcctgaacacactgaccgcaacgcacacaggcactggcaaaggcgttctcgtttatggctccgggcgggcgcaaccgcacgccagatgcgcgtgcggtttgctgttgtaaccccagcgccacacccacggcagccagcccgcctgctgtgcgaacgacatcgcgcagaaagcggcggcgaccattttgaggtttcgcactccgggacataatggcttacaccttctccagtttgaccgcgcacttcttgaagtccgtctctttgctgagcggatcggtcgcatccagcgtcagtttgttaaccaactgtgcggcgtcgaagaacggcatgtacaccaggccctgtggcggacggttacgaccgcgcgtttcaacaatgctgatcacttcgccacggcgagaaaccactttcactttgtcgccacggcgcagatcgcgcgctttcgcatccagcgggtgaataaacaggaccgcttccgggaaggcgcggtgcagttctggtacacggcgagtcatactgccggtgtgccagtgctccagaacgcgtccggtagagagccacaggtcgtactcttcatccggtgcttccgccgccggttcgaatggcagtgcgaagatcaccgctttgccatccggtttaccgtagaacttatagccttcgcccgctttcacgtacgggtcgttaccttcgctgtaacgccactgcgtttctttaccgttcaccaccggccagcgcagaccgcgcgctttgtggtagtcatcgaacggtgccagatcgtgaccgtgaccgcgaccaaaccatgcgtactcttcgaacagccctttttgcagatagaagcccagctcgcgggattcatcgttcagctgatcttccgccagttcggataccgggaatttgctcacttccggtgtggcatacagcacttcgtacagcgttttgccacgcagttccggtttcttcgccagcagatcttccggccatacttcttcagttttgaagcggcgggagaactggactaactgccagagatcgcttttcgcttcgcccggtgcctgtacctgttgacgccagaactgagtacggcgttcggcgttaccgtaagcgccctctttctctacccacattgcggtcggcaggatcaagtcggcggccagcgcactgactgtcggatacggatcggagacgatgatgaagttgcgcggatcgcgccagcccggcatacgctcttcattgatgttcggcccggcctgcatgttgttggtacacatggtccagtaaacattcagtttgccgtctttcagcgcacggtcttgtgccaccgcgtgcagaccgattttcgccggaatggtgccgctcgggatattccacttcttctcgcagatatcacggtgtttctcgttggtcaccaccatgtccgcaggcagacggtgagcaaaggtgcccacttcacgcgcagtaccacacgcagaaggttgcccggtcagggagaacggaccgcaacccggctgggaaattttgccggtcagcaggtgcaggttgtagaccaggttgttagcccacacgccacgagtatgctggttgaagcccatcgtccagtaggagatgactttcttgttcggatcggcatacagctgcgccagttgttctaactggtctttcggcacgccggtcatttcggcagttttttccagcgtatactcggcaacgaaggctttgtaatcttcaaagctcatcggttcggaggcgtcagaacccggattcttcgctgctttttccagcggatgggtcggacgtaaaccgtagccgatgtccgtcgcccctttgcgcaggttaacgtgcttgctgaagaagtcctgatttatcgcattgttttgaatgatatagttggcgatgtagttcaggatcaccaggtcagattgcggcgtaaagatgatgccgttatccgccagctcgaagctacgatgctggtaggtagaaagcaccgccacggtgacgttctggttagagagacgacggttagtgatgcggctccagaggatcgggtgcatttccgccatgtttgcgccccacagcacaaacgcgtcagcctgctcgatgtcgtcatagcagcccatcggctcatccataccaaaggtacgcataaagccaactactgcgctcgccatacagtgacgcgcgttcgggtcgatgttgttgctacggaagcccgctttaaacagcttggacgcggcataaccttcccagatagtccactgaccagaaccgaacataccgatgctttccggccctttttctttcagggcggttttgaatttctcttccatcacatcgaaggcctgatcccaggtgattggggtaaattcgccttctttgtcatatttaccgtttttcatacgcagcagcggctgcgtcaaacggtctttaccgtacatgattttgggcaggaaatagcccttaatgcagttcaggccacggttaaccggtgcgtccgggtcgccctgacaggccaccacacgtccctgctgcgttccgaccagaacgccgcaaccagtaccgcagaaacggcacggcgctttatcccatttgatggcttcctgctgaccaacaacggcgcgggcaacgcccggcacgctgagaccggcagccgccgcagcggccgcaacggcgttagctttcataaagctacgacgactgagtttcatggtgtttcctcaccttgctcttcctgctggtgataaaccaggctcaccgccagcacgccctctacgttgcgtacactctcaatggtttggatcagcgtttcgctgtcttctgcttccaccaccacaatcaactgaccgctcggcgcgtcgctgacagcaacttcacagccgggaaaggcgttcagttgggtgctgatgtcactaattcgttcgcttttggcctgcacgaccaggctgcaaacttgccagttagtgtgcatggagatactccgcagttatggcacttaccggacagctggctgcacatgctccacatccgttgcaaagttggctattaagttgcggctggtagatcccggagagcgtcgggcgaaagataattgccattggctcacagctatcctgacagcggcggcattcaacactctgatacgccaggcacgcgtccccgatggtgaactgcaaatcccaggccctggtgtggcgcggagaaaataggctttcggggcaagcctgcgcgcaggcgtaacagaagctgcactcgttatttttgaaattaacgctcggatagccgcccgcgccgcgttgcagaatgttgttttcacaagcattaatacaggcgtcgcagcgggtgcaatgggtcagaaaatgagattcatcaccggaccagggcggacggataccgttactggctttgcgccagcgaccagtgagtatgccccgacgggatgcatcaatcttcacattgaccttccatcattaacgcgctctgaaaattgagagcgaccaaataaaccgcataattaataagccatttttatagccgctaagatattaaaggatgtgtcaaagatgcataccccgatcggggtaaaacctgtagcaggatcaaaagagtggcgggaagcgtggcaaaaacgggcttttgctcacatttcaaatggttataaatatatttatatagcgattgattcaccagagatatttctgctggtttgctctctcattagaatttaacactaaaagagcaggtaaaattgtctgaatgttctttaagttattcataaagcaaattaataaatctgatgaatatgttaaccttcagcgacatcatcggtgaaaacctataaatgaagaaggaaagcaaaaaaatgaagaccattctacctgcagtattgtttgccgctttcgctaccacttccgcctgggcggcagaaagcgtccagccactggaaaaaatcgcgccttatccacaagctgaaaaagggatgaagcgtcaggtgattcagttaaccccgcaagaagatgaatctaccctgaaagtagaactgttaatcggtcagacgctggaagtcgattgcaatttgcatcgtctcggcgggaagctggaaaacaaaacgctggaaggctggggctatgattattatgtctttgataaagtcagttccccggttagtacgatgatggcctgcccggatggcaagaaagagaagaaatttgtcaccgcgtatctgggcgatgctggaatgctgcgttacaacagcaagctgccgatcgtggtgtatacgccagacaatgtagatgtgaagtaccgcgtctggaaggcggaagagaaaattgacaacgcggtagttcgctaaactgccgtgaagtgcggcaccccgtaggtcagacaaggcggtcacgccgcatccgacatccaacgcccgagccggttgcctgatgcgacgctggcgcgtcttatcaggcctacaccgctgtgaagtgcggcaccccgtaggtcagacaaggcggtcacgccgcatccgacatccaacgcccgagccggttgcctgatgcgacgctggcgcgtcttatcaggcctacaccgctgtgaagtgctccaccccgtaggtcggataaggcggttacgccgcatccgacatctaacgcccaagccggttgcctgatgcgacgctggcgcgtcttatcaggcctacaccgctgtgaagtgctccaccccgtaggttggataaggcggttacgccgcatccgacatccaacgtccgagccggttgcctgatgcgacgctggcgcgtcttatcaggcctacaccgctgtgaagtgctccaccccgtaggtcggataaggcggttacgccgcatccgacatctaacgcccaagccggttgcctgatgcgacgctggcgcgtcttatcaggcctacaccgctgtgaagtgctccaccccgtaggttggataaggcggttacgccgcatccaacatctaacgcccgagccggttgcctgatgcgacgctggcgcgtcttatcagcatacgccacatccggcataccatgccggatgtggcgtatcattacaacgcaatatccgccacttctttttgaacgggttgcggtttcaactgcggtttcggcgtactatctgctgcctgcggcttgtcgtagttcaaccccagcacttcgctggtgtactgcaactcgcgttctgttgccgctacatcaccgttcagcttgcgtccataagacggaacgatcgctttcaacgtagcctgccattgcgggctggaaacacgatcgccaaatactttttccagcagattcaacataatcggcgcggcggtactcgcccctgggcttgcccccaggagcgcggcaatggttccttgctggtcactgacgacttcagtacccagacgcagtacgccacctttctcggcatcacgcttgataatctgcacgcgctgccccgcttgccacaaacgccagtcctcttttttcgcctgcggatagtactctttcaacgcttcaaaacgatcctcttcactcaacatcacctgactcaccagatatttcaccagatcgaaattatccagcccgacgtgcatcatcggcatcacgttagaggtggtggtggaactcattagatcccacaaactaccgtttttgaggaatttggtactgaaggtggcaaatggcccaaacagcactacgcgtttaccgtccagaacgcgggtatcgatatgcggaacgctcatcggtggtgcgccaacggatgctttaccgtaaaccttcgccagatggtgattaaccacgtccgggttttcgctaacaaggaactgtccgcccaccgggaaaccggcgtagtctttcgcttccggaatcccgctttcctgtaacagcttcagcgccgcaccgcccgcgccgataaagacaaatttggcacgaatgttctgtgcagtgccatttttcagatcggcaacggtaacggtccaggtgttatcgtcattacgctttagggcgcggacttcgctgctgagttgcaggctgaagttagatttcttctgcaaggaagcaattaactggcgggtgatctcgccgtagttcacatcggtaccaatttccgtacgcgtggctgccactttctgttgcggatcgcgcccttccatcactaacggtgcccactctttgatctgcgcgtgatcttcagagtaacgcataccgcgaaacaggctgctttgttgcaacgcggcgtaacgggcgcgcaggaaattgacgttatcctcgccccagacaaagctcatatgcggaacggtattgataaaactacgcggagtacgcagcacgccgcgctcaacctggtgcgcccagaactggcgggaaatctgaaatgcttcgttaatggcgactgctttttcaatactgatgctgccatcggcgttttgcggggtgtagttcagttccatcagtgcagaatgcccggttccggcgttattccagccgttgctactctcctgcgcgacaccctccaggcgctccaccatggtcatgctccattcaggctccagctcgcgtaaataggtccccaacgtggcgctcataatgccgccgccaatcaacagtacatcagtttcctgctcctcggacgctttcgcttttgccgccatgctaacggcattaagccccacggccatgctgaagagcatggcagtcacttttttcatcttgttaatgccttacttttagtcgctttattgcaggtgagatttgcgcggcatcaacggtaacacttaagtaacaacatttaaataatgtttataaattatattctaattttagaaacattataatttcgttgattaattatagggttattagaaatgaagggatttttagcatattgacctgacggcagcagtccgccaggtcagcgtcgtaatattatgccgtccgggcaacggcatcacggctagcggcatcgcgctcttcgcccgtcagctcgctaagttgcccattgcgcatttccagcaggcggtcggcgtggataaagtaatgatcatcatgactgatagcgaaaatagttttacccatctcctgcatcagcggcagcaacacctgataaaactcacgacggaagtgtggatcctgatccgccgcccattcatccagcaggataatatcgcgttcttctgccagcgccagcaacagcgccacgcgttttttctgccctttacttaacttcaggttaacaatacgcccgttgcttaactcaagcttatgagccattttcagctgcgccagccacttctcaaccagttgcgggttagcgggtttaccctccggccccagcagttgatcaaacagccagacatcggtaaacactgcgctaaacagtttgcgataatcttccggttgttcgccgctgacaggtttgccatccagcaagatttcgccgctttgtggctgatacaagcccgtcaacaacatcgccagcgtgctttttccgctaccgttgccgccaatcagaaacagcagctcgccacgtttgatggtgagattaatcggaccaacggaaaacgcgttatcctgataagcaaacgtcacgttacgcagctccagcgtttgccagttgggaaacgcctgcgggcgcggaaactctgctttgaaaggcgcgagcgcgaatttgttcagcttgttaaacgccacctgcgccgtcagcagcgtcggcaatgcgccaaccgcgctaagcagcggcgtacgcaggaataaaagcgtcaagctataggtcgcggcaacgttggtatcagcccaaccgaggctgttcgccatccagaacaccaggccgattgcgcccagcatcatgatgttactccagttcacggcactaagatggaaggtgtctgcgcgaataatatggtggcgatactcttgcgcatcaggaatgtagaggttgttaaacacatactcggcgcgttcccggttcagagtcagctctttgcgcccttcaagtacagtttgaaaatccgtgtacagcttgtcttcggtttcacgcagggtcgccatatgtttgtacacccgcgccaccagcacaaaaccgccccagatggtgatcgccatccagatagccgttaccagcaacattttgccgctcagcatccacagatacgccgcactaccgatagtgagaatgatcccctgcaccagttccggcagacgcacaaaagcaatggtgatattgcgcacatcgctggttaaccccgccagcaagctggcgctaccgagttgttcaatgcgctcgacgtgagtatccagaatccgcttgataaattcactacgcagtcggtaaacgaagtgatgccccaaagtggtgagcgccagttggcttccgagagtgactgccatcaacagcagcaataatcccagaaactccggcaacaccagcagactggtatccgccgtttcgataaggcgctgattgataaaagcaattaagccaatgcctaatgccgcactggcgaggcttagcgccatcacactgataaatggccagcgatactgccgccagacaagtacaagaagttccatgcagaaaacccggacaatgaattacagcccgcagtttaaacatcttcgcgcgcacagcaataataattcttatttttattcttttttacctgcctgacggaatgtcaggttgtagcggcagtcgatggtgagtggatgaaaccccgctttcaacggttgaataccgtgataaaacagccggctttcaccgccccataccaccacatcgccatgttccaacaacaaacgtttgagcggatcatttcgtttcaggccgccaaattgaaaaatcgcgggtaagcccagagaaacagaaacaattggcgcgcgcagatccggttcgtctttatcctgatgcaggctcagtttcgcgccaggagcgtagcggttgataagacaagcatctggctggaaatctggatagcccgccgccgtagccgcacgttgacataaattatgaaaactctgtggcatggcgggccacggtttatttgtttgcggatcaatggggctatagagataaccttgccgatgggtcgtccagcccagatgcccacagttggtcatcgccacgctcatggtatatcccccgggggtgaccatctggcgaaacgggctctggctggcaacgtcattaatatcgcggatcagttgctccgcagcgttaaaagcaaaacgccgtaaaattaccgcaccagccgccagtggctcttgccacggttcagcatcggcaaacagatccaacattacctctcctcattttcagcttcgcggcgcagcagttgcgctttacggctcacgccccagcggtaaccggaaagtgtgccatcaccacggaccacccgatgacagggtattatgatagccagcttgttggcggcacaggcgctggcaacggcccgtaccgctttcggtttgccgatggcgttagccagttgctgataactgacggtttcaccgcaaggtatcgtgcgcagtgcctgccagacttgttgctgaaaagcagtgccgcgaatgtccagcggtaacgtcagcggcgtatcgcgttgattgaggctggcgatcacttcacgcacatgttgctgaaacatcagatcggcaggcgcgttgtcggcagcgggaaacatctgctgcaactcgctgattagtgtcgcgtcatcatcgcccagcaatatcgcgcaaatcccccgctcgctttctgccaccaggcaacgacccagctcacaatcagccagcgcgtaacgcaccgccagattttcgccaccgtgacggaattgtttagccgtcatgcccagcgtttcgtcagctttgcgatagtaactgctgctgtcggggaatccggcgttaagaatagacgtcgtcacgctctcccctttcgccaggctttcgcgcaaacggcgagcgcgccaggcctgttgccaggctttaggcgtcattccggtagtcgctttaaacaaccgatgtagatgaaatggactcatcgccacctggtcggctaaggcttccagcgttacaggcgtttcctgttccagcagtcgacacgcgtgggtgattttatccaaccgatgttgctgggcattggctttttctggctgacaacgtttgcaggggcgaaagccagcggcgagtgcctcgctggcatttgcgtagaaggagacgttttcccgcaaagcatgtctggcgcggcaagacggacggcaaaagatgcctgtggtacgcacggcgaaaacgaattcgccgtcggcattcgggtcgcgggctaagacagattgccagcgttgatcgtcagttaagcatgtggcttttttcataatcagctccctggttaaggatagcctttaggctgcccggtcaccatcacgcaaaaaccaacaatcttgcgctttaatttttttcgctgacaaggaagcttttaaactgtggactcatccaggttttaaagctatcgccttctttggtgatcatataaaccgccagcccttcccggcgaacaacctctttagctttctccggcccgagtaccatcaagccagtatcccaggcatcggcttccagcgccgtcggagcaatcaccgtcacggataccagattgtgttcgatgggacgcccggtttgcggatcgataacatgggaaagacgtttgccgtccagttcgtaatagttacggtagctgccagaggtgctaatcccatgaccgttgatatccaccacagcctgaaccgcgttttctttatcggttggtttttgaatcgctacccgccacggcaggccttcaccgttcataccacggctgttcagcgcgccgcccacgctcaccagatagcgggaaatcccttcctgctccatcaagcgtgccaaatgatcggccgcatagccttcgccgacggtggagagatcgacatataaatccggcaggtctttttgcagatattgctgatggctctgattgatgaccgtcaggtgctgtaagccggttttggctttcatcgcatcgatctgttcctggctcggaatttgaaccggctgttgttccgggccaaagccccacagattcaccagcggcccgacggttatatccatcgcgccatcggtcttcgcgccaatgcgcaggctggtggtgacgatatcggccatcgcttcacttaccggccacgggcttaaactttggctgtcgttaaagcgcatcagcgcggaatcttttttataggtgctaagcagctgatcgtcggcgtccagttgggtctgaatcttttctttaagttcggcgctgcgtttggcgtcaatgcccgggatgctggcacgccagaaggtacccatagttttgccttcaagaacggtaacttcagtagcgtgggttttggcgggttgtggtttttgatcgcaaccaacaaagaagagcgcggcagccagcagtgccacgcgggtaaagcttatttccatacgtgattatcctcatgcgaacggtcgcaagagtacaccaaaaaactgagtttgtacgctgaaaacaatgaaaaaagggcccgcaggccctttgttcgatatcaatcgagattagaactggtaaaccagacccagagctacgatgttatcagtgttgatgccagcgtcacgagtgaactggttgtcgtccagcaggttgattttgtagtcaacgtaggtggacatgtttttgttgaagtagtaggtagcaccaacatcaacatatttcaggatatcttcgtcgtcgtagccacgacccaggtttttacctttagactgcaggtaagccagggacggacgcagaccgaagtcgaactggtactgagcaacagcttcgaagttctgtgctttgttcgcccaacccagggaacctacgcgagttgcgttgtaggtctgggtgtactgagcagccaggtagatgttgttagcgtcgtatttcagaccaccagtgtaggtttcagcacggtcgccgttaccgatgtaagcagcggtgttctgagcatcagtacgtttggagctggagatcgcaccaccgataccgaaaccttcgtaatcataagtgatagaaccgccgacgccgtcgccgttttgacgcagtgcgtcacgaccgttgttagttacgccactagtaaagccttcaccagatgggttgccgtttttaccctggtactgaacagcaaagttcaggccgtcaaccagaccgaagaagtcagtgttacggtaggtcgcgaagccgttaccacgctgctgcatgaagttgtcagaaccgtaggtgtcaccaccgaattctggcagtacgtcggtccaggaagttacgtcataaacaacgccgtagttacgaccgtagtcgaaagaacccacatcctggaatttcagacctgcgaatgccacacgggtccaggagttgttttcgttttcagcgctgttgccctggatctgatattcccactggccgtaaccggtcagctggtcagtaacctgagtttcacctttgaagccaagacgcatgtaggtctggtcgccatctacatctttgttgtcagagaaatagtgcaggccgtctactttaccgtacagatctaatttgttgccgtctttgttgtaaacttcagcagcgtttgctgcgcctgctaccagcagagctgggaccaggagggacagtactttaactttcatgttattaaccctctgttatatgcctttatttgcttttttatgccactgcatactgattaaccctcattaatcagtcggcaagtccattctccccaaaaatgcagaataatccaacacgaatatgatactaaaacttttaagatgtttcatttatcgctatagatgtttcaaaatgtaaatgcaagggaactttttaagattattgcggaatggcgaaataagcacctaacatcaagcaataataattcaaggttaaaatcaataacttattcttaagtatttgacagcactgaatgtcaaaacaaaaccttcactcgcaactagaataactcccgctatcatcattaactttatttattaccgtcattcatttctgaatgtctgtttacccctatttcaaccggatgcctcgcattcggttttttttacccttctttacacacttttcattattctgtgctaccacagaaaaactataacgcttgttaactatttcacaaataattaacatccgcataatttccagcaatctttgtttatttgcaattatttttgttgggctttttgtaggttatttgtacagcaaaatggcgcttgtacatctatttcccccaatgcaggatgataaatatcacgggagaatagagaatcatcaatcaggtaagagtctggaatttcacactgtaccctttatactgccctatcacttcgcgaagttttaacaggtcataaacacgaatgcgtcagaaagagacaacggccacgacccgctttagtctcctaccggggagcattacccgcttctttttactgttgatcattgtgttactggtgacgatgggtgtaatggtacaaagcgccgttaacgcctggctgaaagataaaagttaccagattgtcgacattacccatgctatccaaaagcgcgtcgataactggcgttacgtgacctggcagatctacgacaacattgccgcgacgacctccccctcctccggcgaaggtttacaagagacgcgcctgaaacaggatgtctactatctggagaaaccacgccgcaaaacggaagcgttaatctttggctctcacgacaacagtacgcttgagatgactcagcggatgtccacttatctggatacattgtggggcgcagaaaatgtaccgtggagcatgtattacctgaatggtcaggataacagtctggtgctgatcagtaccctaccccttaaagatctcacctccggatttaaagaaagcaccgtcagcgacattgttgatagtcgtcgtgcagagatgttgcaacaggccaacgccctcgatgaacgcgaaagcttttctaacatgcgccgcctggcctggcagaacggtcattactttacattgcgtactacctttaaccagccaggacatctggcaacggtcgtggcttttgatctgccgattaatgatttgatcccaccgggtatgccgctggacagtttccgccttgagccagacgcgacggcaacgggaaacaatgataatgagaaagaagggacggatagcgtcagtatccactttaacagtacgaagattgaaatctccagcgcactcaactctaccgatatgcgcctggtctggcaggttccttatggcaccttattgctggatacgttgcaaaacattctgctgccactgctgctgaacatcggtttgctggcgctggcgttatttggctataccacattccgccatttctccagccgcagtacagaaaacgtccccagcacggcggtcaataacgaattgcgcattttacgggcaatcaatgaagagatagtcagtctgctgccgctcggcctgctggttcacgatcaggaaagcaaccgcactgtcataagtaacaaaattgccgatcatttgctgccgcatttgaatctgcaaaacatcaccaccatggcggaacagcatcaggggattattcaggcgacgatcaataacgagctgtatgagatccgcatgttccgcagccaggtcgcgccgcgcacacaaattttcattattcgcgatcaggatcgcgaagtgctggtaaacaagaaactcaagcaggcgcagcgtctgtatgagaaaaaccagcaggggcggatgatctttatgaaaaacattggcgatgcgctgaaagaacccgcacagtccctggcggagagcgcggctaaactcaacgccccggaaagcaaacaactggcgaatcaggcagatgtgctggtgcggctggttgatgaaatacagttagcgaacatgcttgcggatgatagctggaaaagtgagacggtgctgttctccgtgcaggatttaattgatgaagttgtgcctagtgtgttgcctgccatcaagcgtaaaggtctgcaactgctgattaacaatcatctgaaagcacacgatatgcgccgcggcgatcgcgatgccttacgacgtattttgctgctactgatgcaatatgccgtgaccagtacgcaattgggaaaaatcacccttgaggttgatcaggatgagtcctccgaagaccgcctgacgttccgcattctggacacgggagaaggcgtaagtattcatgaaatggataatttgcacttcccgtttatcaaccagacccaaaacgatcgctatggcaaggcggacccgctggcattctggctgagcgatcaactggcacgtaaactgggcggtcatttaaacatcaaaacgcgggatgggcttggtacacgctactctgtgcatatcaaaatgctcgcagctgacccggaagttgaagaggaagaagagcgtttactggatgatgtctgcgtaatggtggatgttactagcgcagaaattcggaatattgtcactcgccagttagaaaattggggtgcaacctgtatcacacccgatgaaagattaattagtcaagattatgatatctttttaacggataatccgtctaatcttactgcctctggcttgcttttaagcgatgatgagtctggcgtacgggaaattgggcctggtcaattgtgcgtcaacttcaatatgagcaacgctatgcaggaagcggtcttacaattaattgaagtgcaactggcgcaggaagaggtgacagaaagccctctgggcggagatgaaaatgcgcaactccatgccagcggctattatgcgctctttgtagacacagtaccggatgatgttaagaggctgtatactgaagcagcaaccagtgactttgctgcgttagcccaaacggctcatcgtcttaaaggcgtatttgccatgctaaatctggtacccggcaagcagttatgtgaaacgctggaacatctgattcgtgagaaggatgttccaggaatagaaaaatacatcagcgacattgacagttatgtcaagagcttgctgtaacaaggtagcctattacatgaacaatatgaacgtaattattgccgatgaccatccgatagtcttgttcggtattcgcaaaagtcttgagcaaattgagtgggtgaatgttgtcggcgaatttgaagactctacagcactgatcaacaacctgccgaaactggatgcgcatgtgttgattaccgatctctccatgcctggcgataagtacggcgatggcattaccttaatcaagtacatcaagcgccatttcccaagcctgagcatcattgttctgactatgaacaacaacccggcgattcttagtgcggtattggatctggatatcgaagggatcgtgctgaaacaaggtgcaccgaccgatctgccgaaagctctcgccgcgctgcagaaagggaagaaatttaccccggaaagcgtttctcgcctgttggaaaaaatcagtgctggtggttacggtgacaagcgtctcagcccaaaagagagtgaagttctgcgcctgtttgcggaaggcttcctggtgaccgagatcgctaaaaagctgaaccgcagtattaaaaccatcagtagccagaagaaatctgcgatgatgaagctgggtgtcgagaacgatatcgccctgctgaattatctctctagtgtgaccttaagtccggcagataaagactaatcacctgtaggccagataagacgcgttagtgtcttatctggcatttgcaccgattgccggatgcggcgtaaacgccttatccggcctacgattcccattatttcaacaaattacattaaagtaggccagataagacgcgtcagcgtcgcatctggcatttgcactgaatgccggatgcggcgtaaacgccttatccgtcttagctatcccggcttttcctgaccctctcggcatataacgtcagcgtctgttttatcacatccagcgttaccggcttgctcaggcagctgtccataccggactccagacaccgctgcttctcttcagccaacgcattagcagttactccgattaccggcaacgtcagtcccaactgacgaatgcgttgcgtcaagcggtaaccatccatatttggcatgttgacgtcgctaagcacgatatcaatatgattcttgctaagtacattaagcgcatcgacgccatcattcgcggttttacattgatagcccaagcttcccaactgatctgccagcaaacgccggttaatcggatgatcatccacgaccagaatcatcatatcgtcattatcgctgaccgctttgtccgtactcggcagagcgttagcaggatcgtcgctctccatctcgatcaaataaatacgcgccaacaatgccggtagctcatgcggagcagccacactgtgtacccactcccctggcgctttctccagcggaataccaatatggcgacgacagaaggtcactaccgctctgccctgccattttttactcactacctcgtcagtgatcaacacatcttcgggagtcggttcctgcccttcgtatgttgtaacgacgatgccgctgcgctgcaaactggtttccaggaactgacagaggctcgcattgcggaccgccagccagcagcgtttaccactcaacccttccacgccttttttctgcgggtactgagcgccgtacaacggaatacgcacggtaaactggctgcccattcccggttcactatctacgctgatatcgccgtccatcatgctgatcagtttttcacaaatcgccagacccagaccggtcccctggaaattacgctgtacgcccgttccgacctggaagaagggatcaaacaagcgcaccacttctttcgccggtatccccacgccggtatcgcgaacacggatagagagataatcgccatccgcgcgaacatgcaaaactatacagccggtatcggtgaattttatggcgttactcaacaggttggagatgacctgctgtaaacgcatcgggtcgccatttaaggccactggcacatccggttcaataaagcagtacaagcctaactgcttgcgtaccaccagcggtaaatagttggcggtgatgtggttcatcacttcacgcggactaaactcacgcggttcgatcttcaactgttcgctttcaatcttgctgaaatcgagaatatcgctgataattttcaacaacaggctggaagagttgttcattgccgtcaccagccgatcgacgcctttcggtaactctttggtttgcaacagatccaggttaccgataatgccatacagcggcgttcgcagctcatgactgacggtggcaaggaacatgcttttactctggctcgcctgttccgctgcttgtgccatctcctgcaagctctcttccatcttcacgcggctagaaacatccaccagcacacaaatggccacgttttcattacgatagcggctatggacgaagctgatttgcagattggtattgttgctggtcaggacatcaacaaaattgacctgctgcccacagataatttgcgtcagtcgttggcggtcctcatgcgtaagcatattgagataggtatgcgccagttcgttacttaaaatattgacgccatcagcggtacgcaaaatgcagatacccactggcgcggaggcgacaatcttgcgattgaactgctcatgttcttccagtcgcagggcgtcgctttccgccggaatgaaaatacgtcgctcgtacatccgtgcgagagtaaacaatgcagctccggcaagcacattcagcaaaattgcgttaaggatcaacatgcgaatgcgttccagcaccttatcaaccggcacgctatacacgatgcttaggctactgggtggcagatttttcttcagcaccagctcccggaacccttccgtatagccaaaccaggagcgttcctgcatccagcgaggatcgcccttaattttactttctggtccggtaaggctaatcagggtatgaccattttcatcaagaatggtaacccccatcggcaacgtacccggtaagaaaaagttctccatccggatggtctgctcgacacccaaaagcgcctgcaaccggttcgccagataaactggcgtcaacgcgtaaaaatacccgacgccagggcgcggaccttcgctgatccagtagaggttactgccgctatcatcttgtggtgcatttcgatatttattgatgcgttcatgcaaagctttcaacgcggtatcgcgttccactggcatatcacgcagaccgaaattggccatgcagaggttatcgctgccgattaaaaatacccggtttagatcgtaagccgcagaaaaattatcgcgccagtagcgcataaaccacgccaaactctccagagaacctcgccaggtgttactcattgcggaacaatcggagtcggcaaacagcggttcaaacgcaggcacatccgcctgcgtttctcgtccacgcggggaaagcacaccgttttctgcgcttaagcgattttcggcgatgtacttcagctctttcatcacatcagaggtgcgttgaataaagcgctgagcctgatcggaactcagattaaattcctgacgaatttcgctttctcgctgatgtaacgcattaacgatgtaaaaaacggaactaaaagcaatcaacagccagagcactaacgccaatgctctgaacatgtagcggctggctttcagggttgtacgaaaagaagcaaggtatttcaaaggggcgaagctccgcctcaggtgaccgatggagtgtggttaaggtagcggtaaaagcgtgttaccgcaatgttctctcttctctggaatatgatacaccgccgagaaatcatcaccttaacctctgataatcgtcatataccggacaagactagtggatttcagcatgcattatatgaagtggatttatccacgccgcttacgcaatcaaatgatcctgatggcaatcctgatggtcattgtcccaacgcttactattggttatatcgtagaaacggaaggacgtagtgcagtcttatctgaaaaagagaaaaaactttctgccgtggtcaacctgcttaatcaggcactaggcgatcgctatgatctctacatcgacttaccacgtgaggagcgtatccgcgcattaaatgcagaacttgcccccattaccgaaaatatcactcacgccttccctggcatcggtgctggttattacaacaaaatgctggatgcgataatcacctacgcgcctagtgcgctatatcagaataatgtcggcgttaccattgccgcagatcaccctggtcgcgaagtgatgcgtacaaatacccctttagtttatagtggcaggcaggtgcgcggcgatattttgaatagtatgctccccattgagcgtaatggtgaaatcctcggctatatctgggccaatgaattaaccgaagatattcgccgccaggcctggaaaatggatgtgaggattatcattgtgctcaccgctggtttgctgataagcctgctgttgattgtccttttctcccgtcgcctgagcgccaatattgatatcatcaccgatggcctcagcactctggcacaaaatattcccactcgattaccacaattgcccggtgaaatggggcaaatcagtcagagtgttaataacctcgcccaggcactgcgtgaaacgcggacacttaacgatctgattattgaaaacgctgccgatggcgtcattgccattgaccgccagggtgatgtaaccaccatgaacccagcagcagaagttatcactggctatcaacgccatgaactggtagggcagccttactccatgttgttcgacaatactcagttctacagtccagtactggatacgctggaacatggcaccgaacatgtggcgctggagatcagttttccaggtcgtgaccgcaccattgaactcagtgtcactaccagtcgtattcataacacgcacggtgaaatgataggtgctttggtgattttctctgatttaactgcccgcaaagaaacccagcgccgcatggcgcaagcagaacgcctcgccacactgggtgagctgatggctggcgtcgcgcatgaagtacgtaatccgttaacggctattcgtggttatgtacagatcttgcgccaacaaaccagtgacccaatacatcaggaatatctgtccgtagtactcaaagaaatcgatagtattaacaaagttattcagcaattgctcgaatttagtcgtccacgccacagtcaatggcaacaagtcagcctcaatgcattggttgaagaaactctggtactggtacaaaccgccggcgtacaagcgcgggtcgacttcataagcgaactggataatgaattaagcccgattaacgccgatcgtgaactgctcaaacaggtactactgaatatcctgatcaatgccgtccaggctatcagcgcacgagggaaaattcgcattcaaacctggcaatacagcgacagtcaacaggccattagcatagaggacaacggctgtggcattgatctcagcctgcaaaaaaagatcttcgatccctttttcaccaccaaagccagtggaaccgggcttggtctggcgttaagtcaacgcatcattaatgcccatcagggtgatattcgcgtcgccagtttgccgggctacggcgcaaccttcacgcttattttaccgatcaacccgcagggaaatcagactgtatgactgctattaatcgcatccttattgtggatgatgaagataatgttcgccgtatgctgagcaccgcttttgcactacaaggattcgaaacacattgtgcgaacaacggacgcacagcattacacctgtttgccgatattcaccctgatgtggtgttgatggatatccgcatgccagagatggacggcatcaaggcactaaaggagatgcgcagccatgagacccggacacccgttattctgatgacggcctatgcggaagtggaaaccgccgtcgaagcgctacgctgcggagccttcgactatgttattaaaccgtttgatctcgatgagttgaatttaatcgttcagcgcgctttacaactccagagtatgaaaaaagagatccgtcatctgcaccaggcactgagcaccagctggcaatgggggcacattctcaccaacagcccggcgatgatggacatctgcaaagacaccgccaaaattgccctttctcaggccagcgtcttgattagcggtgaaagcggcaccgggaaagagttgattgccagagcgattcactacaatagccggcgggcaaaggggccgttcattaaagtcaactgcgcggcgctgccggaaagcttgctcgaaagtgaactgtttggtcatgaaaaaggtgcatttactggtgcacaaaccttgcgtcagggattatttgaacgagccaacgaaggtactctgctcctcgacgaaattggcgaaatgccgctggtactacaagccaaattactacgcattctacaggaacgggaatttgaacggattggcggccatcagaccataaaagttgatatccgcatcattgctgccaccaaccgcgacttgcaggcaatggtaaaagaaggcaccttccgtgaagatctcttttatcgccttaacgttattcatttaatactgccgcctctgcgcgatcgccgggaagatatttccctgttagctaatcactttttgcaaaaattcagtagtgagaatcagcgcgatattatcgacatcgatccgatggcaatgagtctgcttaccgcctggagttggccgggaaatattcgagagctttccaacgttattgaacgcgccgtcgtgatgaatagtggcccgatcattttttctgaggatcttccgccacagattcgtcagccagtctgtaatgctggcgaggtaaaaacagcccctgtcggtgagcgtaatttaaaagaggaaattaaacgcgtcgaaaaacgcatcattatggaagtgctggaacaacaagaaggaaaccgaacccgcactgctttaatgctgggcatcagtcgccgtgcattgatgtataaactccaggaatacggtatcgatccggcggatgtataacaccaaaacttgctatgcagaaatttgcacagtgcgcaattttctgcatagccgctcattctccttataaatccccatccaatttatcccttcatattcaattagttaaataactaaatccaataatctcattctggcactccccttgctattgcctgactgtacccacaacggtgtatgcaagagggataaaaaatgaaaacaaaattgatgacattacaagacgccaccggcttctttcgtgacggcatgaccatcatggtgggcggatttatggggattggcactccatcccgcctggttgaagcattactggaatctggtgttcgcgacctgacattgatagccaatgataccgcgtttgttgataccggcatcggtccgctcatcgtcaatggtcgagtccgcaaagtgattgctagtcatatcggcaccaacccggaaacaggtcggcgcatgatatctggtgagatggacgtcgttctggtgccgcaaggtacgctaatcgagcaaattcgctgtggtggagctggacttggtggttttctcaccccaacgggtgtcggcaccgtcgtagaggaaggcaaacagacactgacactcgacggtaaaacctggctgctcgaacgcccactgcgcgccgacctggcgctaattcgcgctcatcgttgcgacacacttggcaacctgacctatcaacttagcgcccgcaactttaaccccctgatagcccttgcggctgatatcacgctggtagagccagatgaactggtcgaaaccggcgagctgcaacctgaccatattgtcacccctggtgccgttatcgaccacatcatcgttagtcaggagagcaaataatggatgcgaaacaacgtattgcgcgccgtgtggcgcaagagcttcgtgatggtgacatcgttaacttagggatcggtttacccacaatggtcgccaattatttaccggagggtattcatatcactctgcaaagcgaaaacggcttcctcggtttaggcccggtcacgacagcgcatccagatctggtgaacgctggcgggcaaccgtgcggtgttttacccggtgcagccatgtttgatagcgccatgagttttgcgctaatccgtggcggtcatattgatgcctgcgtgctcggcggtttgcaagtagacgaagaagcaaacctcgcgaactgggtagtgcctgggaaaatggtgcccggtatgggtggcgcgatggatctggtgaccgggagccgcaaagtgatcatcgccatggaacattgcgccaaagatggtagtgcaaaaattttgcgccgctgcaccatgccactcactgcgcaacatgcggtgcatatgctggttactgaactggctgtctttcgttttattgacggcaaaatgtggctcaccgaaattgccgacgggtgtgatttagccaccgtgcgtgccaaaacagaagctcggtttgaagtcgccgccgatctgaatacgcaacggggtgatttatgattggtcgcataagccgttttatgacgcgttttgtcagccggtggcttcccgatccactgatctttgccatgttgctgacattgctaacattcgtgatcgcgctttggttaacaccacaaacgccgatcagcatggtgaaaatgtggggtgacggtttctggaacttgctggcgtttggtatgcagatggcgcttatcatcgttaccggtcatgcccttgccagctctgctccggtgaaaagtttgctgcgtactgccgcctccgccgcaaagacgcccgtacagggcgtcatgctggtcactttcttcggtagtgtcgcttgtgtcatcaactggggatttggtttggttgtcggcgcaatgtttgcccgtgaagtcgcccggcgagtccccggttctgattatccgttgctcattgcctgcgcctacattggttttctcacctggggtggcggcttctctggaagtatgcctctgttggctgcaacaccgggcaacccggttgagcatatcgccgggctgatcccggtgggcgatactctgttcagtggttttaacattttcatcactgtggcgttgattgtggtgatgccatttatcacccgcatgatgatgccaaaaccgtctgacgtggtgagtatcgatccaaaactactcatggaagaggctgattttcaaaagcagctaccgaaagatgccccaccatccgagcgactggaagaaagccgcattctgacgttgatcatcggcgcactcggtatcgcttaccttgcgatgtacttcagcgaacatggcttcaacatcaccatcaataccgtcaacctgatgtttatgattgcgggtctgctgctacataaaacgccaatggcttatatgcgtgctatcagcgcggcagcacgcagtactgccggtattctggtgcaattccccttctacgctgggatccaactgatgatggagcattccggtctgggcggactcattaccgaattcttcatcaatgttgcgaacaaagacaccttcccggtaatgaccttttttagttctgcactgattaacttcgccgttccgtctggcggcggtcactgggttattcagggacctttcgtgatacccgcagcccaggcgctgggcgctgatctcggtaaaagcgtaatggcgatcgcctacggcgagcaatggatgaacatggcacaaccattctgggcgctgccagcactggcaatcgccggactcggtgtccgcgacatcatgggctactgcatcactgccctgctcttctccggtgtcattttcgtcattggtttaacgctgttctgacggcacccctacaaacagaaggaatataaaatgaaaaattgtgtcatcgtcagtgcggtacgtactgctatcggtagttttaacggtagtctcgcttccaccagcgccatcgacctgggggcgacagtaattaaagccgccattgaacgtgcaaaaatcgatagtcaacacgttgatgaagtgattatgggtaacgtgttacaagccgggctggggcaaaatccggcgcgtcaggcactgttaaaaagcgggctggcagaaacggtgtgcggattcacggtcaataaagtatgtggtagcggtcttaaaagtgtggcgcttgccgcccaggccattcaggcaggtcaggcgcagagcattgtggcggggggtatggaaaatatgagtttagccccctacttactcgatgcaaaagcacgctctggttatcgtcttggagacggacaggtttatgacgtaatcctgcgcgatggcctgatgtgcgccacccatggttatcatatggggattaccgccgaaaacgtggctaaagagtacggaattacccgtgaaatgcaggatgaactggcgctacatagtcagcgtaaagcggcagccgcaattgagtccggtgcttttacagccgaaatcgtcccggtaaatgttgtcactcgaaagaaaaccttcgtcttcagtcaagacgaattcccgaaagcgaatagtacggctgaagcgttaggtgcattgcgcccggccttcgataaagcaggaacagtcaccgctgggaacgcgtctggtattaacgacggtgctgccgctctggtgattatggaagaatctgcggcgctggcagcaggccttacccccctggctcgcattaaaagttatgccagcggtggcgtgccccccgcattgatgggtatggggccagtacctgccacgcaaaaagcgttacaactggcggggctgcaactggcggatattgatctcattgaggctaatgaagcatttgctgcacagttccttgccgttgggaaaaacctgggctttgattctgagaaagtgaatgtcaacggcggggccatcgcgctcgggcatcctatcggtgccagtggtgctcgtattctggtcacactattacatgccatgcaggcacgcgataaaacgctggggctggcaacactgtgcattggcggcggtcagggaattgcgatggtgattgaacggttgaattaatcaataaaaacacccgatagcgaaagttatcgggtgttttcttgaacatcgacggcgaaggtaaccccattaatcaccagtcaaaacttttcaccagcgtcagctcgccagcattacgcatcggtacaataaatgtttcctgtttctcattgacgcttccttcatcggtgatcagcgtcagttgggcggtggttaattccgtttcgctgcgcccaccatagtagttgatatacacctgatagcgcccgtgaattggcgcgggcatggcgaaaatctcgggtccgtaccccgtcgtgacatccatatccagtgcaccactgtttttcagcacggtgttaccgtaccaggcgtgttcgccatcgggcgtaacaacgtgaaggtcgaggtcggtattgtccgtatcccagctgagaaccagccgtaaacgtgcacgaatcgttcctgtacccggcgtactgtaaaactgcattttttgtcggctttgcccatccgggctgatgacctgcacgctgttgctgccttcagtgaaaatataagggcgtgcaaaactaccatcggattcaattctctgcggcatactggcaccgttgaccaccagccggccctgctgaactttacccgccgcagcataattctttattttgccgcggatctgcgcactgatattttgatcatctgccatgttgacggagctcgccgggtaattgatgctttgactaaaactggcatcttcgccctctgccggatgccagccactgagcggtgcatcaatctcgacttcctgcacaccttcactgtgagcgacagggctaagcgccaccagtaacaacggaagaaaaatctttcgcatagcattagtccattaataattgtcgggtcagcgtttcgatatagttctcatcaagcccggtgggataaccatcaaaggccaggtgcagatactcatgggttaaatccagccgatcctgaagcgtaaagaagttacgaataaacagccgtttctgctgccgatcggtataggggaaaccactgactaaacggcaaaccgcaaacacgtctggttcgttgtaccccgtctcagcttgtaatatacgccgccactgcggcatttttttcgccagccaggctttcgctttgggtaataactggcaggtactgcgtggcgctccccagcggctaagactgttgtcgggataagcaaacgcgagtatctgatcgtaacgctctccctgccccgcctgggccgtggcttgccgccaggaaagtgtcccttcggtagcgcgactgccatgataatgaaccggatcgcctgcatagatgagatcctgcgtccaggcggtcatcgttcgcgcccccgtggtcgctgggctagcagaaacacgctgcgtggcgctgctgtcggggatggtcaggcaatcgccttcccgattggcgttttgctgtaaaaaagtgcgaatcgccacggtcatggctttcgctgcctcagggggcgtacttttcgcctcgcgatccagaactctggcaacgtactcttcacgatcgagatggctctgcaatttcagtttgcccttttcgctcagtaaggtcgtctcaccgtggctgacaaacgtaatgtggttaccattagtaaacgtcacacgatagcgcccattaagtacgccgggatttactgccgtcgtactcttttccgctgtgattttcttcagcggatagcgggcaaacagctccacctctacacattgcccactggcaacctgcgtcggcactggcaaaacccgattaagcaccgtcgcataacgggttagtaccgttttgctggtgccactgccagtaacccacagcggtgtaccatcggttaaccagccagcaaaaccaccctgacggatttcctgtttatcatcggcaaaccagctccaggttttcacccgtacccgactaccgagcatggatgcgacaccgattttcgcctcgtccagcaccacatccagtaagacttcctgagctttgttttgcgcgggtaacgtcgctaaactatcaagcaggcttttaaccgttacgctggtttctggcttcagcgtagtcagagacgctaaccacgcaggtgcctgacgctgttgccagtattgcccccacacatctgcgccaatatgcaaccgctgcggcgcaaaatagagcccacaggaacgtaccagcgcggtatcgcgcgttatgctctccccagcctgacaacaataaacctcttccggggagtttccgcgacactggtagggctgctccggttgatgggtatcctccagccaggcgtaaacatacagtttccacaaactccctaacggcgtggtgaggctgtcaggtaatgcactgactttggtcacgccactactgctcagctgatacagttgatcgtgctgcgcaccgcgcagcaccagttgtaacggcgtctcctccgcaagtgttggcagagtaaccaacgccaatagccagacgattcagcgccagttcacttatttcacctgcatcccggtccattcactccctgccgcaacactttgctgcgcaggtgcataggaacgcacataacgagcaggaggcagaacgaattgccctttttgcgagaagcgcagcaaatggcggaaagtgaccgttcccgtcagttctttcaccggcaccatataggccagttcgcccatttcatttcgcgctttttccagcaattgcccctgctgtttcgcggcgttgggtttattgaccgaaatgccccatgttgtgcgctcaacgtcggctcccggtggcagcggtacttccacctgaccgtagcgcagaactgcatcctgctcgctggtaagcgtgatttcatcgagatacagcgcatcgctgtcaatctcattgctggtcaccggttgcagaataaagctcatctcttcttcaccagggataagccgatacaactggcgttcaacggtcaccggaatgttactttgttgagccatttttgccggctcacgtcagcggacctgcacattttgcggcgataattcgtcaccaaaagagagaatgtccggcacgccctgaccaacccaacgccagtcttcgccccctccagttaacttatgtttagcccatgcgcccgcaggcgcaggcaaaacaactggaggcattgtcgccatatatttcgccagccagttcatggccagcgcgcgctcaatagtggattgctcagcggtcaaaccacttaaaatagcggccgtctgggtagcgtcgccaccgctattaagcagcacaaccgtgtgcgccagcggctgattgctgtttgccgctttatcccacgcatattgctgaacctgtggcatcaccgtggacttcaactgcgcttttttcagcaacgtcatggttaagacgtttgccaccgcatctgccagtggagactccggtgtatcgaggatcaggctatcattgatatcgcgggtgtcttcctcagagaaatcttcagttttagttccgcgccgggcgatagcttcatccaaccctttcaacaacgttttgcacggcaaattcatctcctgcgcccatgccagcaccagcgcccgatgcaataacggcatgttatctgcctgctccgcgtagctgtcgagcatatgctgccagtattccggttgttgcgttacgccgatcgcctggctggcctgccagtcggcgtaccatgcccatgccgtaaggaaggcgtcaccattgccatcttcaccccaccaggtaaagcgcgctccgggccccgccagttgcatcagccgcagacggttatcctgaatcatctgacgaatgtcgttagcggcggcactttgatgatcggcaagcgaacgccaggcgagactgagcgggatcagacggctaccggtgttgattacgccaccccacggttcatcgactaacgcatcaagattgttgcggaaaatctcctgcggcgtttcactactttgtagccggatattgctcgcctgctcgggcaacatcagcgcgttatcgccaccaccgagcatgacatttttctgctgttcaacgggccagctgttatccacaaaagacagttttgtgctaatgctgtcctgcacttgcccattttgttgcagttctgcacttaacaagccagattgctgaatattctgcgtcagcgaaatataattcgcccctttgtgcagcgtcagcgtctggcgcatctcagcgcctgcaaatttagtcaccagcgccaccggttcgttatcctgctgactgaagataaatagtcctgccgccggtttgtcgcccacgcgatacaccgttggcatactccacttcatgtagagatttttttccgaacgcagataagcacgcccctgcccgaccagcccgtcgccgttcatcccacgcgcggtgatacgccagcgggttaacgaatcaggcatcaggaacgtgaaatacgctttgccttgtttatcggttgtgagtgacggcatccatgccgcggtatccacctcttcacgccgtggacgttcaagcatttttactcgccgctcgctgcggttagttgcgccaggcgcaaccggctcgctggagagcgcctggtcgtagctgataaacgacagactggagctggtacgcacattgttacgccccagcggatagaaaaatttgccgatattcggcgcgatttctggttgcagcgcgtagatcatttcatcgaccacgcctaccgttagctgcgcagaaacaggtttacctttcagcgacgaggttaattcgacattgaccagttcaccaggctggtaatgggttttgtccgttttcacccggatatccagctggggaacggcaactttgatcccggcgttctgaaaactgtactgaccgttacgggtatacagcaccgaaaaagtgatgttaggcgcaaaggaattgctcactggaacccgggcttcatactgggtatcgtttaaacgttgtagcgttagccagtttgccggatgcgaaagcagcgactgctgttccacgcgatcgcgttccagcgtcaataatgcttcatcaattggctccggaaaggtaatcagcatcttcgcggtttcgcctggctggtacagcgttttatccgccacgatatctaccgtaccagtatgcgccgtgctgcccttaccgctgacggcatgacttaacccagcgagaattaagccgtctttatcgcgtaatgtcagattgtagttgccaggtttagcgaaattgacggtaaaggatttgccgcctgacggtagctctccgctatggctcgtgcggtcttcgagacgcaaccattcatacgtaacaggaacctgttttgaagattccagcgcggcataacggaacacaaccgactcgccgctattactgtattgtgcggcagtacttaatgagtaatgcgccagaccgcgttcaatgaggatctctttggtggtggtgacgcgatacgccgcgccgtcactggcggagacggttaacaaatagcggctcggtttatcggcggcggggagatttaacgccacatgaccgctggcgtcggacaccgtttcgctgccttccagcgacacggggaaacgtccggcataacgcaaatcgttaccgaccattgataattgctgagcgcgcaaacttaactgcacgcgggcattttttaccggctcgccatccgggtagagcagttgcagtttgccgctgaccgcttcgccagttttgaactcttttttggcgagagctaaaccaatctcgaaatgtggcttgatgtagtttgccacgcgaaaactgctgctatagacctgattgcggtaagcaagacgtaactcataacctccggctacggcattttctggcaggcggaaacttccctgcccgccattgcgcgcatccagcgtgacattgacggtttgcaacagactgccgttggcgtccagcaccgaaagcttcgccggggcgctgacgatgggggatgaatgcaacggatcgtggaactcgcggccgatcactttaacatcgacacgatcgcctgcgcgatatagcgggcgatcggtaaaaatatacaagcgggtgttgtagatttcgctttcgtagaagaagttctcggagacaaaaacgccgccttcagcatccttacccagaatgtatgaacgttctggcgatatatgttgtaactgcaaggtaccgctgtcatcggtcacaccgcgggtcatcacgccaagaccgtcagtccacaagatctctgagccgggcttcgcttcaccctgttttttacccgcggtccacaccagaagctctttgcctgacactttgctaagcgccacggtatcggaaacaaacaccaccgtcgtcgcccgatacccaccaaccatcgcctcgacgaggtacagtcccggctcttgttggccgagaggaatataaatgttacccggctgcggcgagatgaaattgctggatgcgccttccagttttaccccttgctgcggctcgaacggtttagcctgccatagtggataacggaactgtttcaccaggggatattttttcagcggggaaaactggttgttctgtacataacgggaaggtttaataatggcattgccgagctgtaattcgggtaacgcctgagtcacattctgccgtgactgagaagagaaagtacgctgcatcacgcggcgagatttgccgtaccagttatcccacagccaggttagcgtattgttcagcccgtcgcccagatattgcggttgcaccacaatgcgatgcaggtttttctgctggcgcaaaaatgccatcgggtcaggaatacgatacaggcgaacgtccacgccgccgtactcttccatctgatagcgccgataatcacgccccggcgcttccagtcgcactttcgcctcttcactgctgctaaaactgctgtcagcaagcaaaaagaatgttcccccggcaggcggcgcatagttgctggaaggaagcgaatcatcagcattagcaagccctgttcccacaagagacagggacaagcacgctgttatcgcgccagaaaatttaaacgataaatgccaatgaaattgggattggaatcgttgggtatccatcgggtgtccttccatgtcataagttgttgcagactgactgcgcgcattccgttgtcagttttcgtggcgcttccggtgtggtagatgacgtaacgccccatccagaccattaagtgctgggcatcgccctgatcgaaaaaaatcatatcgccaggcagcgcctggtttatgtcctggccaataaactggctgttgtactgaatcaaattaatcgcggtcacataggggccggttttcccgttcccctgattccagttttgcgccagttgacgctgttcaggtgttagcgtcatctctggcggcaaatactggctagataaaccgttactttttagccatttactgtcgtgaactttcagcgtctcgttcgccgcaaatcgcaccaggcccgcacaatcctgctgataccagcgtggacttggcccctggcggagctgttcttgtgcaatgcgtacaaaccaggcgcgaaacagcccggattgttcgacattcagcatttcgctatgggcaacaacacaacacagccagcaaatcagcgccagcagcccgtgcctcatagcggctgccaggttatgggtagccactgccaggcggcaccgggttccatctgggccagcttcatgacataacgcggttgttgagataaagcgtccagcttcggcattaataaagtttgtgcggcgttataaaaaaccggttcgagattcttcggcagactggtcaacgtttcgttacgcagcagtttcgctattccttgtggattgatatagagcggaacgatgccatcagtgggtattacatccaccattgccgggcgggttttattcagtgtttgcagcgcgttattaaccagcgtgtcatcgagggagaaaagcagcgttttgttttgcatcgccaggctcacacggaaaaaataatcgctcattaattgatcgggttgcgccgcctgcgctttcggatactggccgtatcgggaactcacttcgcgacgccagatttgcgcttcgccctgctgagtctggcttaccggcaaaacaccttctggcgctttgctttcgtgcgcaccaatattttgcgtaaacagtttccctggcaattgcgcctgttcggcagtgccatcaaactgaccgacaaacagcggggtttgcaatttactgtcttcataccagcacagccccgcggcaccgtctaacgccccattcagcttgtcgttttcctggctgatgtggctaagcatctcttcggcaataccgtgactatacggcaccgccacacagaagctggctccggcaggcatactgttccataccggcgtaaaatcgaaactggcatctacgctggcggattcatcatttaacgccacaaaactgtgccagccgtcgttacccatttcgaagcgtacgccagcaaaagaaggcattaaccgctggtagccaaaccccagccacctggcgctgactacgatgcgctggcgtactggcgttttttcggcagtacgctcttccaggccaaagcttgcttgccagcgttttttgccgctcaacaaatcacctgcgatcgccgtggcttcggtatcctgctgatcatctttaaacaacatatccgtgctggaaaacaccagcatcttgtcctgataagtcgcgaacatcagggcgttattgccgttatagcgcaactgataaacaggaacagtttcactatttatcttgatgctactgatttccgttttgcttaactggctgtcgctggtagcggcaaacaacaatggctccagcagtttgcttaaaccactgcgctggatcagcaccatataatgactaagatggccttgtttatcgtgccacagcgctgcctgcgcgggctgatctaagagactgctaaagagcttatctttcagcgtgagatcgtgttcatagacaatacgacgaatgctgccttcaatgcccagacgatcggcatgattctgataatagaaaacgaaatcttcgctcagaacatcgtggagaaacggaatggtgaggagatctttgggaagctggctcagagagtcgctgtcgagaaagaggtccggctcattgagatcgatttgcagattgttgtgcaccaccagcgggctcaacgttttttctggcccactgccagcatattgcaacgcccagacgccagcggaaagcagtgctattgcgccaaaacctacaagaccatagaaccgccagcctttcgccttttttcaccactcattgccacattccttgtgtatagccagccattttttacgggcacagccaaactttaccgtgccctaatacgacaaaagcccagactttgcagcctggacttttcaattcaaacaagggagatagctcccttttggcatgaagaagtaaaattattcttcttctggctcgtcgtcaacgtccacttccggagcgatttcatcgtccccttccgcggcactgccgtcgatggtatccagatcttcctcgtcaaccggttcagcaacacgttgcagacccactacgttttcatcttccgcagtacggatgaggatcacgccctgggtgttacggcccacgatgctgatttcgctaacgcgagtacgtaccagcgtaccggcatcggtgatcatcatgatctggtcgcagtcatctacctgtaccgcgccaacaactaaaccgttacgttcggtaaccttgatggagataacccctttcgtcgcacggctcttggttgggtattccgccactgcggtacgtttaccgtaaccgttttgcgttgcggtgaggattgcgccatcgccacgaggcacgatcagagagacgactttatcgccttcacctaagcgaataccgcgaacaccggtggtgttgcagcccatcgcacggacagaagactctttaaagcgcaccactttaccttcagcggagaacagcattacttcgtcttcgccgctggtcaggtcaacgccgatcagctcatcgccgtcaaccagtttgatcgccactttaccggcggtacgcagacggttgaactcggtgaggacagttttcttcacggtaccgttagcggtcgccatgaagactttcacgccttcttcaaactcggtcactggcaggatcgcagtgatacgttcgtcctgctccagcggcagcaggttgacgatcggacgaccgcgcgcgccacgagtggcttccggcaactgataaactttcatgctatagacgcgaccacggctggagaagcacagaatatggtcgtgagtgttcgccaccagcagtcggtcgataaagtcttcttctttaatacgtgcggcagatttacctttcccgccacgacgctgcgcttcgtattcagaaagcggctgatacttaacgtagccctggtgagagagcgtcacgaccacatcttcctgggtgatcagatcttccaggttgatgtctgcgctgttggcggtgatttcagtacgacgtttgtcaccgaactgttcacgaaccagctccagctcttcacggatcacttccatcagacgatcggcgctaccaagaatacgcaacagttccgcgatctgatccagcagctctttgtattcgtcgagcagtttttcgtgctcaagaccggtcagtttctgcaaacgcagatccagaatcgcctgagcttgctgttcggtcaggtagtacagaccatcacgcacgccgaactctggctccagccattccggacgcgcagcatcgtcgccagcacgttcgagcatcgcggcaacgttgcccagctgccacggattagcaaccagcgcagttttcgcttctgcaggcgtcggcgcatgacggatcagttcgatgatcgggtcgatgttcgccagcgccacggctaatgcttcaaggatatgagcacgatcgcgagctttacgcagttcgaaaatagtacgacgggtcaccacttcacggcggtgacgaacaaacgccgcgatgatgtctttcaggttcatgatcttcggctgaccatggtgcaatgccaccatgttgataccgaaagaaacctgcaactgggtctgggagtagaggttgttgagcacaacttcaccgaccgcatcgcgtttcacttcaatcacgatgcgcataccgtctttgtcagactcgtcacgcagcgcgctgatgccttccacgcgtttttcttttaccagttccgcaatcttctcgatcaggcgcgctttgtttacctgatacggaatttcgtggacgataatggtttcacgaccggttttggcgtcaacttccacttctgcgcgagcgcggatatacaccttgccgcgaccggtacggtaagcttcttcaataccgcgacgaccgttaatgattgccgccgtcgggaagtccggccccgggatgtgttccatcagcccttcaatgctgatgtcttcatcatcaatatacgccagacaaccgttgatgacttccgtcaggttgtgcggcgggatgttggttgccatacctacggcgataccggaagaaccgttcaccagcaggttaggaattttggttggcatgacgtccggaattttttccgtgccgtcatagttatcaacgaaatcgaccgtctctttttcgagatcggccatcagttcatgggcaattttcgccagacggatttccgtataacgcattgccgccgcagagtcgccgtcgatagaaccgaagttaccctgaccgtctaccagcatataacgcaggctgaatggctgcgccatgcggacgatcgtgtcatagaccgcgctgtcaccatggggatggtatttaccgattacgtcaccaacgacacgggcagattttttataggctttgttccagtcattgcctagtacgttcatggcgtaaagtacgcgacggtgtaccggcttcaggccatctcggacatctggcagcgcacggccaacaatgacgctcatcgcataatccagataggagctcttcagctcttcctcaatgttgaccggtgtaatttctctcgcaaggtcgctcatctaaccgctatccctctactgtatcccggattcaaaggtcgcaaattataacacagccgcgcagtttgaggtaaacctatacgctttattcacatccaatgcctgatatactcgtttgtcttgccaattacggagtagaagtgccaatgaatgccgaaaaaagcccggtaaaccataacgtagaccacgaagagatcgctaaatttgaagccgtcgcctcccgctggtgggatctggaaggtgagttcaaaccgctgcaccgcattaacccgctgcgtctgggctatattgccgagcgtgctggcggtttatttggcaaaaaggtgctcgatgtcggttgtggcggcggcattctggccgagagtatggcgcgcgaaggcgcgacggtgaccggtctggatatgggctttgagccattgcaggtggcaaaactgcacgcactggaaagcggcattcaggtggattacgtgcaggaaaccgtggaagagcacgcggcaaaacatgccgggcagtatgatgtggtgacctgcatggagatgctggagcacgtccccgatccgcagagtgtggtcagagcctgtgcgcaactggtgaaaccaggcggcgatgtctttttcagcacacttaaccgcaacggcaagagttggctgatggcggtggttggtgcggaatatattttgcgcatggtgcccaaaggcacgcatgatgtgaagaagtttattaaaccggcagaattgctgggctgggtggatcagaccagtttaaaagagcggcatatcactgggctgcattacaacccgatcactaatacttttaaactcggccccggcgtggatgtgaactatatgctgcacacgcagaataagtgaggttgatgtttggccgcgccaatgcctgatgcgacgcttgccgcgtcttatcaggcctacaaatgctccccgtaggccggataaggcgtttacgccgcatccggcaaccgtgccgactagacagtgattaccatttcaccgtcatgctcaaaaaccctgccgtctgggcaaaatcatcactccctttctgccacgccacgctgccgcgcagggacactcgctgactgatattgcccgtgactcccacttttatttcaccccgttgcttcaccgcatcgtcactgatagtgctgccatcctcttcaatttccgtgctatggggatcgtgataataattcagatctaatgttggtatgacatgaacagcggtacgccattcgctgtgtaaacccagccgcgtctgaatatcatcaccctggctttgactcacgcgcgcacggttagcggcggtaaaatcatcctgctgcacgccctgataaatcacctgcgcctgcggttcaatcaccacaccacgccccggtaaccactgataccccgcctccaggctggcgataatcccgctgctgtggtaatgatctgtgccatcttcttgttcggaaacatcattgctaaaccacgcgtattgcagccagctatccagccaggccccttgcttctgattaccgtgctgaaaccagctacttgtcagcccaacggcataaccgtggttctggttatcggcgcgagttccggtcatattgctgcggctgtcgccctggttatcgctgtagccaccaacaatcccaagcatccactcgccatccgtgccccagcgcccgctaaacagatcgccgctaagttgcaccgtagaagtgtcttcatgttgagccagttgccccgctgctgtgtaatgataatctccgccgataacacgtaaattcagcgtctgaccatcgccacctgcgtgatcgcgtcgctccatcataaacgcctgatttgccgcccgcaggttattaagataaccgccaactttggcattcaacaccggctggtaagcaggcgtaggttccgggtcgggtgttggatcaggatccggcgtgggatcaggatcgggagtcgggtctggatcaggtgggcttggcggcgttacttcttggcttcgcagataccagtcgttgttatcttccaccagcgtgtagtcatacgctcccatattgacgtagccgctgcctgccagactgaactgcgcattgttttgaaactgcgtgggatcagctgcgaaatcaaccactttaatgcctgtgcttgtcggctcaccaatccctgtaatggagttaaccaccacagttgtgttgccagcagtattaccgttcatcaccaattgatcgcttacgctgtcatcgccgtttaattcgctatcgagcagtagcgtaccgccgccggtataatcaccgtttaccgtcagcgtatcgccagcgacgccattttgcaggctaaccgcaccggacgtattggtcagattgccattaaccgtcacgttggaaagataagtcaggctgtcagtttcaaggttggtattaagctcacctgtcaacgtcacaccatcggtggcattcaccagcgtcccatcgccgttaaatagactggcattaagggcgacggaagtatcctgcccggtcaggcgcaaaaccgtaccatcgctgatgtcgatagtgccgctggaaatagcatcaatactctgaatatcctgatccgcgccagtaacgaacgttgccccatcaccaacccacagactgctagcataaggaaggatatcagcaacatcacctttcagggtgccttcttcgacacgtaccgcgctctgcgttgtaccgctggcggtcagctccagtgtaccagcccccgttttagtcaatgtgctaccctcatcctgatgctgcccgctgctgtcagccatcagtgcgccccactgcgtgtctacccccgcatcaactgccacttcaccgtcggcgcgcatttcaatatcacgtccgtggcctgccgcatcactacgcgtgtcaacgtcggaggtaatctccatcacgctttcttgttgcttatcggtaaagataacctggcggttatagtgggtatctccaagctggctgttgtcgctcaccatcagcgtaccggaggcgatttgtgttgtgcccaaataactattattgtttgccagacttacctgcccgtcgctcgcatcgaccaccacgtagacgccatctttcccgtcgccgccgatatgcaaattgtcgccacctgcaagatctaccacatcctgactgccgataaccgttccgctgctgccactgacttcaaggccatcgttgtaacttgtgccgctctgccaggtggagaaatcagagagatcgagcacaccgccgtttaacacgatgctctgcggatcgtcctggagagcggtaagatctgccgcgtcgccttccaggctaagcaccgcaccatcatcaacgactatatcgccggttagcgccatgctctgcgcccctgccagcacgtagctgccgttttgcgcaatggtgagctgaccagcaccttcgatgatgccagcaaaactgccctgattaacagtaacgttgccaccagcatcgatatttaaagtgccattctgaaagcccgtcaatgcgtgcacaaaagtttgttgggtgctgccaacgtttagctcagcctgattctgatactgatcaatactccctatcgtcagaccgtagcagtcttgcggatcgtcctggcaatgcgtatcgccgacattcatcagggagttgctgcggcccagggtaacttcaccgttttcaatctgcatctcaccagtaaagtcattgttatctgcattaagtaccagatcgccggaacctgttttggtgattaacccggtaccagcaatagagtcaacagctccgtcattctctgtattgccaataaccagcgtttttccgtcggcaatatcaaaggtaacttcacttaagccgagatacataaagccacccgccgcagaggaaggaccatctccatagcctgctgcgctattgttctcatcgactaacacgcctccgttctggctgtagctgtcatcaacagaaatatcaataagatagggagccgtcacgctattggtatatatcgccccgccataaccttcggcagtgttatttgtaaaggcagtgttatttactatcgtataaccactaggatgcttgctgtcgctattattatcggtaacatcgattgccccgccatcgccatcactgtaacttgtacttgtatatgcctggttgttatcaaaaataacatcacttaaataaacgtcattattaatggtataaattgcgccacctttgccatcattagcgatgttattgcgaaacatggcgttagtgacacgtaaatcgacggcaccagtatcgttagtaccagaagaatagattgcgccaccatagccgcctgcgacgttaccggaaaaaataacatcagtaagattcagcgtactgttttctttagcaaatatggccccgccgttattatattctcctgtaacggtgttattggcaaacagagtcattccagtttcattttctggtaatagactaaattccgctccttgttgcaaaaatacggccccaccgctggcgttattggtcatatcgctaaaaaccagccattgcccatcagcgatactccagtcctgcgtaatgccactaaggctttgcctgctggcctgacaactcgctttgacatcatatccctggcaactatcagtgaccgccgcgacaccgttagcagagaaaagagatgcaatcatactcgggagtaaagataaatactccttgcgtagaaagataatccgcatattaatctaaccatcattttctataagacggcgtatttaatcgcattatacgatatggaatatctttcttttgtaaattgttcaacccggtgcaatggctattttgttattatttgatgaataatatcagtgcgtcataattcaagttaataaccttcagggatatcagttatatttaaactaaattaaagtcatgaataattttcttataatataaggtaaattaacaaaatggcttagcatttaacaataaccgaatagaaaacaaccatttcgccatcaacaatctcttacattcgcttatatattgaccacaactgatacatcagattatgtgatgactcgtgcttagatcaatttttgcaatcattagcaaaaagattaataagccatctatatcaatttatctaacctattatgccgttcaagaaatcgccgaacagttatttttaacaaatttttctcttcccattgactttcccggacaccttgtctgacctaaggtgcgcgaaagccactttttccttcctgagttatccacaaagttatgcacttgcaagagggtcattttcacactatcttgcagtgaatcccaaacataccccctatatatagtgttctaagcagcttcccgtactacaggtagtctgcatgaaactattgcggaaagaattccaaaaacaggtacgacatacatgaatcagaatctgctggtgacaaagcgcgacggtagcacagagcgcatcaatctcgacaaaatccatcgcgttctggattgggcggcagaaggactgcataacgttagcatttcccaggtcgagctgcgctcccacattcagttttatgacggtatcaagacctctgacatccacgaaaccattatcaaggctgccgcagacctgatctcccgtgatgcgccggattatcagtatctcgccgcgcgcctggcgatcttccacctgcgtaaaaaagcctacggccagtttgagccgcctgcgctgtacgaccacgtggtgaaaatggtcgagatgggcaaatacgataatcatctgctggaagactacacggaagaagagttcaagcagatggacacctttatcgatcacgaccgtgatatgaccttctcttatgctgccgttaagcagctggaaggcaaatatctggtacagaaccgcgtgaccggcgaaatctatgagagcgcccagttcctttatattctagttgccgcgtgcttgttcagcaactacccgcgtgaaacgcgcctgcaatatgtgaagcgtttttacgacgcggtttccacatttaaaattagcctgccgacgccaatcatgtccggcgtgcgtaccccgactcgtcagttcagctcctgcgtactgatcgagtgcggtgacagcctggattccatcaacgccacctccagcgcgattgttaaatacgtttcccagcgtgccgggatcggcatcaacgccgggcgtattcgtgcgctgggtagcccgattcgcggtggtgaagcgttccataccggctgcattccgttctacaaacatttccagacagcggtgaaatcctgctctcagggcggtgtgcgcggcggtgcggcaacgctgttctacccgatgtggcatctggaagtggaaagcctgctggtgttgaaaaacaaccgtggtgtggaaggcaaccgcgtgcgtcatatggactacggggtacaaatcaacaaactgatgtatacccgtctgctgaaaggtgaagatatcaccctgttcagcccgtccgacgtaccggggctgtacgacgcgttcttcgccgatcaggaagagtttgaacgtctgtataccaaatatgagaaagacgacagcatccgcaagcagcgtgtgaaagccgttgagctgttcagcctgatgatgcaggaacgtgcgtctaccggtcgtatctatattcagaacgttgaccactgcaatacccatagcccgtttgatccggccatcgcgccagtgcgtcagtctaacctgtgcctggagatagccctgccgaccaaaccgctgaacgacgtcaacgacgagaacggtgaaatcgcgctgtgtacgctgtctgctttcaacctgggcgcaattaataacctggatgaactggaagagctggcaattctggcggttcgtgcacttgacgcgctgctggattatcaggattacccgatcccggccgccaaacgtggagcgatgggtcgtcgtacgctgggtattggtgtgatcaacttcgcttactacctggcgaagcacggtaaacgctactccgacggcagcgccaacaacctgacgcataaaaccttcgaagccattcagtattacctgctgaaagcctctaatgagctggcgaaagagcaaggcgcgtgcccgtggtttaacgaaaccacttacgcgaaagggatcctgccgatcgatacctataagaaagatctggataccatcgctaatgagccgctgcattacgactgggaagctctgcgtgagagtatcaaaacgcacggtctgcgtaactccacgctttctgctctgatgccgtccgagacttctagccagatctctaacgccactaacggtattgaaccgccgcgcggttacgtcagcatcaaagcgagcaaagacggtattttgcgccaggtggtgccggactacgagcacctgcacgacgcctatgagctgctgtgggaaatgccgggtaacgatggttatctgcaactggtgggtatcatgcagaaatttatcgatcagagcatctctgccaacaccaactacgatccgagtcgcttcccgagtggaaaagtgccgatgcagcagttgctgaaagacctgctcaccgcctacaaattcggggtcaaaacactgtattatcagaacacccgtgacggcgctgaagacgcacaagacgatctggtgccgagtatccaggacgatggctgcgaaagcggcgcatgtaagatctgatattgagatgccggatgcggcgtaaacgccttatccggcctacggctcggtttgtaggcctgataagacgcgccagcgtcgcatcaggctccgggtgccggatgcagcgtgaacgccttatccggcctacggctcggatttgtaggcctgataagacgcgccagcgtcgcatcaggcacaggatgcggcgtaaaatgccttatccggcattaaactcccaacaggacacactcatggcatataccacctttagtcagacgaaaaatgatcagctcaaagaaccgatgttctttggtcagccggtcaacgtggctcgctacgatcagcaaaaatatgacatcttcgaaaagctgatcgaaaagcagctctctttcttctggcgtccggaagaagttgacgtctcccgcgaccgtatagattaccaggcgctgccggagcacgaaaaacacatctttatcagcaacctgaaatatcagacgctgctggattccattcagggtcgtagcccgaacgtggcgctattgccgcttatttctattccggaactggaaacctgggtcgaaacctgggcgttcagtgaaacgattcattcccgttcctatactcatatcattcgtaatatcgttaacgatccgtctgttgtgtttgacgatatcgtcaccaacgagcagatccagaaacgtgcggaagggatctccagctattacgatgagctgatcgaaatgaccagctactggcatctgctgggcgaaggtacccacaccgttaacggtaaaactgtgaccgttagcctgcgcgagctgaagaaaaaactgtatctctgcctgatgagcgttaacgcgctggaagcgattcgtttctacgtcagctttgcttgttccttcgcatttgcagaacgcgaattgatggaaggcaacgccaaaattattcgcctgattgcccgcgacgaagccctgcacctgaccggcacccagcatatgctgaatctgctgcgcagcggcgcggacgatcctgagatggcggaaattgccgaagagtgtaagcaggagtgctatgacctgtttgttcaggcagctcaacaggagaaagactgggcggattatctgttccgcgacggtagcatgattggtctgaataaagacattctctgccagtacgttgaatacatcaccaatatccgtatgcaggcagtcggtttggatctgccgttccagacgcgctccaacccgatcccgtggatcaacacttggctggtgtctgataacgtgcaggttgctccgcaggaagtggaagtcagttcttatctggtcgggcagattgacagcgaagtggacaccgacgatttgagtaacttccagctctgatggcccgcgttaccctgcgcatcactggcacacaactgctgtgccaggatgaacacccttcccttctggcggcgctggaatcccacaatgtggcggttgagtaccagtgtcgcgaaggttactgcggctcctgtcgcacacgcctggttgcaggtcaagttgactggattgccgaaccgttagcctttattcagccgggggaaattttgccctgttgttgccgggcaaaaggcgatattgaaatcgagatgtgaattggttgtagtgccagatacaacgcttatgcgtcttatctggcctacaacgattacatggcgtagtaatacgctttcacctgctcccagtccgctttggggattggctccagatatttttccagctggcggaagtcatgattaatcgctttatcgcgacgcaagcggcgacgacttttctccaggtcaagaaaaccagcttctgcattaccttctgttttcacatagatatggcgaacataacaacagccatgctgacgattaatgctatgcattttcttaaacgccagcgccactgctttcaacatggcttgccgtacttcgtcagaataagggcttactgcatgctgggcataccagtcagcaatgctgatgaaccccgccatatcttcagtcaccagcaacgctcgccattcaccctcaattttcaccgcttcaccaaaaacgatcttcggcacgatgacaccggcccgttccagttctttaattaccgcaacctcacggacaatcgttggtcggccgaacggataacgtacggaatgaaacagatgatgcgtcatgcgctttacatacagctttttgccgttgcgctcgacgcattgcaccccgctcataccattacggcgatagttaggctcttcaacccagtcgccctctgttgcccaccagtgattaaattcgtcgtactttgcactaactgccataccctatcgcctgtcatttttattaacgacaatgactataggtggttacctgaggaaaatcttaatgaaacgtgtcgtattaatgaatttcttttgccactactagcttgacaccgcttttacccttcatttgcagcgcatagattccaccagccactaccactaatagtgcgcccagcagataaaatgtgaatttaatcaggcggatacagcgatgaattttattcgacagggattaggcatcgccttacaaccagagttaacgctgaaaagcattgcaggtgaattgtgttccgttcctctcgaaccaactttctatcgacagattagcttgctggctaaagaaaagccggtagaaggcagtccactgtttttactacaaatgtgcatggaacaattagtggcgattggaaaaatttgatatgagacaggatggcgcatgaacgccatcctgcagtaacattactctttattaagaaattttactgccttatcagggaaatcagtaaacagcccatttacacccgctttgttatacagagcatcatataactgattcacatcaggagtgtattcaggcagtttatcactccgcacggtataaggatgcactaccagtttattctgctgagcatcttgcaccatgccagtgagtttgatattacccggctggcttgtctcctcaatcaacatatggtaatccggaccaataccatctgcatattccgccacctgtttcatggcacccggcttaaacatccagtcgtagttgtaattaacccagcttccatccggctgtttctgctgcgtttcattccagtcggtataggcaatcagctgtaccagattgagctccatgcccattttgggttccagctcattcttaatacgcttcagctcatcagcatcaaaacattgcaaataaactttatcgtctttaccggtgtaaccatatttcttcagcacttccagcgtttttgccgcaatatccttcccttcctgatgatggaaccacggcgctttgatttctggataaataccgatatttttcccggtagagtgatttaacccctgaacaaattcaatctcttcttcaaaggtgtgcacccggaagtcggacttacccattgggaaacgccccggataagtctgcacttttttaccgttttcaatatcgaaaccttcggtaaatttcaagctcttaatttcatccagcgtgaaatctatcgcgtagtaacgaccgtctttgcgcgcccgatccgggaaacgatcggcaacatcagtaacacgatcgaggtaatggtcatgcagaacaaccagattgtcgtctttggtcatcaccaaatcctgttccagataatccgctccctgcgcatacgccatcgcttttgctggcagcgtatgctccggcaaatatccactggcaccgcgatgggcgatgactattttttcgttgctgtccgccgccattgcactgcttcccatgactatagtgctcatcatgatcgccatgctaaggtttttcagcgtcaatttcatgccattagcctccgttgcgttcttgcagtaattgttcatggcgacgtttttcgccaatcatcacaacaatcaacaagataaccgccagaatgctgccgccaatcattaccataaagccgccatcccagccgaagaagtccacggtgtagccaacaatcgcgctcgccgccacgctaccgcccaggtaaccaaacagcccggtaaagcccgctgccgtacctgccgcttttttcggtgccagttccagcgcatgcagaccgatcagcatcacaggaccgtagatcaggaagccgataacaatcatacaaatcatatcgacggttgggttacctgccgggttcatccagtaaacgatagtcgcgatggtcaccagtgtcataaagaaaacgccggttgccccacggttgccacggaagactttatcgttcatccagccgcacagcagagtgcccggaatacctgcatattcataaaggaagtaggcccaggaggatttatctagcgcgaaatgcttaacctctttcagataagtcggactccagtcgaggatgccgtaacgcagcagataaacgaacacgttggcgatggcgatataccacagcagtttgttcggcagtacgtactgcatgaagatttgcttcgccgtcagctcctgttccgctttttcgttatagtcgtccggataatcatttttgtactcttcgatcggcggcaagccacaggattgcggggtatcgcgcatcatcgcaaaggcgaataatgccaccagaatggcgcagaaagcaggcatatagagcgccgcatgccagtcattgaaccaggccatccccagcaggaacagcagcggcggaataccaccaccgacgttgtgcgcacagttccacacactcacaatgccgccacgttctttctggctccaccagtgcaccatagtacgaccacacggcggccaccccatcccctggaaccaaccgcagaggaacaacagtacaaacatcaccgcaatgctgctcgtcgcccatggcacaaagcccataaacaacatcactgccgccgccagaatcaaacctgcgggcaggaaaacgcgcggattgctgcgatcgcttacgctacccatgatgaatttgctaaatccataagcaatgctgatcccgctaagggcaaaacctaaatcaccgcgactgaatccctgctcaaccagataaggcatagcaagcgcaaagttcttacgaaccaaatagtaagccgcatagccaaagaatatccccaggaaaatttgccagcgcaatcgacgataagtcggatcgatctccgcggcaggtaagcgcgctttgtgtggcgctggtttaaaaatactcaacattgatagcctccgtggcccgtggtcttatttatgattaacagcctgattcagtgagagaacctgccgtttcttgagttgccgcgatgttaagaaaacattcataaattaaatgtgaattgccgcacacattattaaataagatttacaaaatgttcaaaatgacgcatgaaatcacgtttcactttcgaattatgagcgaatatgcgcgaaatcaaacaattcatgtttttactatggctaaatggtaaaaaacgaacttcagagggataacaatgaaaactcgcgacagccaaagtagtgacgtgattatcattggcggcggcgcaacgggagccgggattgcccgcgactgtgccctgcgcgggctgcgcgtgattttggttgagcgccacgacatcgcaaccggtgccaccgggcgtaaccacggcctgctgcacagcggtgcgcgctatgcggtaaccgatgcggaaagcgcccgcgaatgcattagtgaaaaccagatcctgaaacgcattgcacgtcactgcgttgaaccaaccaacggcctgtttatcaccctgccggaagatgacctctccttccaggccacttttattcgcgcctgcgaagaagcagggatcagcgcagaagctatagacccgcagcaagcgcgcattatcgaacctgccgttaacccggcactgattggcgcggtgaaagttccggatggcaccgttgatccatttcgtctgaccgcagcaaacatgctggatgccaaagaacacggtgccgttatccttaccgctcatgaagtcacggggctgattcgtgaaggcgcgacggtgtgcggtgttcgtgtacgtaaccatctcaccggcgaaactcaggcccttcatgcacctgtcgtggttaatgccgctgggatctgggggcaacacattgccgaatatgccgatctgcgcattcgcatgttcccggcgaaaggaagcctgctgatcatggatcaccgcattaaccagcatgtgatcaaccgctgccgtaaaccttccgacgccgatattctggtgcctggcgataccattagcctgattggtaccacctctttacgtattgattacaacgagattgacgataatcgagtgacggcagaagaggttgatattctgctgcgtgaaggggaaaaactggcccccgtgatggcgaaaacgcgcattttgcgggcctattctggcgtgcgcccgctggttgccagcgatgacgacccgagcggacgtaacgtcagccgtggcatcgtgctgctcgaccatgctgaacgcgatggtctggacggatttatcaccatcaccggtggcaaactgatgacctatcggctgatggctgaatgggctaccgacgcggtatgccgcaaactgggcaacacgcgcccctgtacgactgccgatctggcactgcctggtagtcaagaacccgctgaagttaccttgcgtaaagtcatctccctgcctgccccgctgcgcggttctgcggtttatcgtcatggcgatcgcacgcctgcctggctgagcgaaggccgtctgcaccgtagcctggtatgtgagtgcgaagcggtaactgcgggtgaagtgcagtacgcggtagaaaatttaaacgttaatagcctgctggatttacgccgtcgtacccgtgtggggatgggcacctgccagggcgaactctgcgcctgccgcgctgccggactgctgcaacgttttaacgtcacgacgtccgcgcaatctatcgagcaactttccaccttccttaacgaacgctggaaaggcgtgcaacccatcgcctggggagatgcactgcgcgaaagcgaatttacccgctgggtttatcagggattgtgtggtctggagaaggagcagaaagatgcgctttgatactgtcattatgggcggcggcctcgccggattactctgtggcctgcaactgcaaaaacacggcctgcgctgtgccattgtcactcgtggtcaaagcgcactgcatttcagttccggaagcctggatttgctgagccatctgccagatggtcaaccggtgacagacattcacagtggactggaatctttgcgtcagcaggcaccagcccatccttactcccttctcgagccacaacgcgtgctcgatctcgcttgccaggcgcaggcattaatcgctgaaagcggtgcgcaattgcagggcagcgtagaacttgctcaccagcgggttacgccgctcggcactctgcgctctacctggctaagtagcccagaagtccccgtctggccgctgcccgcgaagaaaatatgtgtagtgggaattagcggcctgatggattttcaggcgcaccttgcggcagctagcttgcgtgaactcggccttgccgttgaaaccgcagaaatagagctgccggaactggatgtgctgcgcaataacgccaccgaatttcgcgcggtgaatatcgcccgtttccttgataatgaagaaaactggccgctgttacttgatgcgcttattcctgtcgccaatacctgcgaaatgatcctgatgcccgcctgcttcggtctggccgatgacaaactgtggcgttggttgaatgaaaaactaccttgtagtctgatgcttttgccaacgctgccgccttccgtgctgggcattcgtctgcaaaaccagttacagcgccagtttgtgcgccagggtggcgtgtggatgccgggcgatgaagtgaaaaaagtgacctgtaaaaatggcgtagtgaacgaaatctggacccgcaatcacgccgatattccgctacgtccacgtttcgcggttctcgccagcggcagtttctttagtggcggactggtagcggaacgtaacggcattcgagagccgattctcggccttgatgtgctacaaaccgccacgcggggtgaatggtataagggagatttttttgcgccgcaaccgtggcagcagttcggtgtaaccactgatgagacgctacgcccgagtcaggcagggcaaaccattgaaaacctgtttgccatcggtagcgtgctgggcggatttgatcccatcgcccagggatgcggcggcggtgtttgtgccgtcagtgctttacatgccgctcaacagattgcccaacgcgcaggaggccaacaatgaatgacaccagcttcgaaaactgcattaagtgcaccgtctgcaccaccgcctgcccggtgagccgggtgaatcccggttatccagggccaaaacaagccgggccggatggcgagcgtctgcgtttgaaagatggcgcactgtatgacgaggcgctgaaatattgcatcaactgcaaacgttgtgaagtcgcctgcccgtccgatgtgaagattggcgatattatccagcgcgcgcgggcgaaatatgacaccacgcgcccgagcctgcgtaattttgtgttgagtcataccgacctgatgggtagcgtttccacgccgttcgcaccaatcgtcaacaccgctaccagcctgaaaccggtgcggcagctgcttgatgcggcgttaaaaatcgatcatcgccgcacgctaccgaaatactccttcggcacgttccgtcgctggtatcgcagcgtggcggctcagcaagcacaatataaagaccaggtcgctttctttcacggctgcttcgttaactacaaccatccgcagttaggtaaagatttaattaaagtgctcaacgcaatgggtaccggtgtacaactgctcagcaaagaaaaatgctgcggcgtaccgctaatcgccaacggctttaccgataaagcacgcaaacaggcaattacgaatgtagagagcatccgcgaagctgtgggagtaaaaggcattccggtgattgccacctccagtacctgtacatttgccctgcgcgacgaatacccggaagtgctgaatgtcgacaacaaaggcttgcgcgatcatatcgaactggcaacccgctggctgtggcgcaagctggacgaaggcaaaacgttaccgctgaaaccgctgccgctgaaagtggtttatcacactccgtgccatatggaaaaaatgggctggacgctctacaccctggagctgttgcgtaacatcccggggcttgagttaacggtgctggattcccagtgctgcggtattgcgggtacttacggtttcaaaaaagagaactaccccaccagtcaagccatcggcgcaccactgttccgccagatagaagaaagcggcgcagatctggtggtcaccgactgcgaaacctgtaaatggcagattgagatgtccacaagtcttcgctgcgaacatccgattacgctactggcccaggcgctggcttaaactcctttctgatgcccggtaagcatgtggttaccgggcatttttgcgtacacgattccgtgcccaatgtatgcgttgcaacgcagtgaaaattcctctgaaaacgtctcgcaaaggctgaaactggcagatgtcaaaggcctgggataaccgtaatgtcgcgtcatcataaatatcaggtgacggacaaccatgaccgaaagtacaacctcctccccgcatgatgcggtatttaaaacctttatgttcacacccgaaaccgcacgggattttctcgaaatacatttaccagaaccactgcgcaagctttgcaacctgcaaaccttacgcctggaacccactagttttattgaaaaaagtttacgcgcttactacagcgatgttttgtggtccgtggaaaccagcgacggtgacggctatatctactgcgtgattgaacatcaaagctctgcagaaaagaatatggcttttcggctaatgcgctatgccactgccgccatgcagcgtcaccaggacaaaggctatgacagagtcccgctggtggtgccgttgctgttttatcatggcgaaaccagcccttacccgtacagtctcaactggctggatgagtttgacgatccgcaacttgcccggcagttgtacaccgaagcttttctgttggtggatatcaccatcgtacctgacgatgagatcatgcaacatcggcgtatagctctgctggaactgattcaaaagcatattcgcgaccgcgatttaatcggcatggtcgacaggatcaccacgcttttggttagaggcttcactaatgacagccagctacaaacactgtttaattatctgctgcaatgcggcgatacctcccgtttcacccgttttattgaggagattgccgaacgtagtccactacaaaaggagagattaatgactattgctgaacggctacggcaggaagggcatcaaattggctggcaggaaggtatgcatgaacaagccattaaaattgctttgcgcatgctggagcagggctttgaacgtgagattgtgctggcgacaacccaactcactgatgctgatattccgaactgtcattaaaaggagagattaatgactattgctgaacggctgcggcaggaaggacatcaaattggctggcaggaaggtaaattagaaggtttgcatgaacaagccattaaaattgctttgcgcatgctggaacagggctttgatcgtgaccaggtgctcgcggccacccagctaagcgaagccgatctggcagcgaataaccactaattaacacaggcccacagccgatccccatgggcctttgatatcaataactaccttttatgcgtggcccatttttgccacttttaaacatcgccagtcgttgatccagggcatcgctgtagagcatcgtgtcaacgccaacagcgacaaagttcgctccccacgccaggcattgctgcgccatatcaggagccacagccagaaaaccagccgctttacccgcagcacggatccgccgaatactggtttcaataattcgctgcacttccgggtgcccggcgttatccgggtagcccaagctcgcagaaagatccgcaggtccaataaacacgccatcaatcccttcgacgtcgaggatttcgtccaggttatccagtgccgttttactttccacctgcaccaacagacaaaggctatcgttaacttgcgccatgtaattctcaatgcgtccccagcgcgcagcccgtgccacactggccccgacaccacgctcaccgtagggaggatagcgcgtggcagacaccacctgacgtgcctgttcggcagtatcgaccatcgggatcagtagagtttgcgcgccaatatccaggacttgtttaatcagcggtttactgccttccaccggacggatcacgggttggctggcatagggcgctaccgcctgtagctgatgataaagatcctgaatggtgtttggcgcgtgctccccgtcaatcagcaaccagtcataaccagaagtggcggcaatttctgccatataggcagtcgtactgcttaaccacagaccaatttgcacttcgcccttgcgtaaacgttctttaaagggattgcttaataatgcgttcatcgtgttccttaacctatttaatgatgtgccacgtcggtctgcgcaacagtgcgatttacacgcagagtgaaaataatcaggctaccgatgaccgccaccgctgccagcgtcagtaatcccgccgcatcgctggcaaataacgtttctgctttcacgcgcaggatcggggcaataaacccgcccactgcaccaaacaggtttacaaaaccaattcccgcagccagcgccgtaccggaaagcagttgtgtcggcatcgtccagaacactggctgcacggcaataaacccgatagctgcaacacacagcgctacgatcgccattactggagaaagcagcccggacagaccaataccaatgcccgccgccagtaatgtcagcgctgcgacattacgccgttcgccggttttatcggaatagcgcggaataagccaggtcccaaacaaggccgcaacccacggaatggcggtgaccacgctcgctgtaaagcccacttttgttcccagcaatgccgcaacctgggtcggcaggaagaaaattaatccgtaaaccgccacctgaatggtcaggtagataatcgctagttgccagactcggccattacgcagcgcatcgctcagccgagaagtcactttctgttgttcttcacttgccagttgattgataagcaacgttttttcttgtttactcagaaaacgtgcctgctccggtgtgtcatcaagccaaaagaatgtgaataccccagcaccgactgccaacaatccttcaatcacaaacatccagaaccagccgggatgccccataaatccatgcatctccaacagcgcgccggaaagcggacttcccagtgttaacgccagcggtgcgcccatatagaacagccccataatgctggcgcgattacgctgcggaaaccattggctggtgagataaatcataccagggaaaaatccggcctccgcagcacgaagcagagtgcgaactatcagaaatttcgcttcagtatcggcccatgccatggctgcgctaagaaatccccacagcagtgttgtcgtaccaatccaggttctggcccccagtttgcgcatcaaaagattcgccggaacacccagaaacgcatataccacaaagaaaatgcctgctcccagcgcataagcttcattactcaacccggtatcaatctggtaggtctgtttggcaaaaccgatattgctacggtcgagaaacgccagcacatacagcgccaacataaacggaattaaacgcacacggtttttcttcaccacggcgtcaagcaaagcggtgctcataaaaagctccttagaatatgtgggcgttaccgttgtcacagcaacgcccggagtgattagtggctgtaggggcgtttcaaattgcagtcatgattgagttcgacgccaaaaccgggtttatcaagcacacttttatgaatacgaccattcaccggaaccggctcattgagcagaatcgggtcaaactgcggacgcatcgtactacaatccgggctggtcatcaggaattcgctgaatggcgtattggtgaaggtgatcaccgcatggtgagagtaaacagagctaccgtgcggcaccaccagttgccccctggatttggcgattgcggcaatttccaccagcgtggttaaaccaccgcaccagccaacatccggctgcataatgtcgataccggtttcactaagcgtacgaaaagattgcagtgtgccgtggtgctcaccgctggtgaccatcattccgactggcgcgttgcgtttcagttcgcgataactttcatactgctgtggcggcaggcactcttcgatccatttcaggttatagggcgcgcaagcgtgggccagtttggtcgcatagttcacgtcctgactcatccagcagtcgagcattaaccagaaatcctcaccgcatttttcacgcatatccgcgaccatagcggcatctttgcggatccccgcatcgccatcatgtggcccccagtgcgtcggcattttgccaccgataaagcccatctcttttgccagatccggacgcgcacctgtggcgtagaactgaatctcatcacgaacagcgccgcctaaaagtttataaaccggaagcccgaccactttgccgaacagatcccacagagccagatcgacacaagaaatcgtattcatcaccaggccaccagagccggagtaatacagggtggcactgagcatttgatcgtggatcagtttgatatcactgacacatttaccctcaatgaaacggttaagatgtttttcgacaataaaacagcccatttcaccggctgtgctaacggcgaatccggtctggccgttttctgcttcgacttcaacaaccaacgtgccaagaacgttaatgccaaaactctggcgactctgctcgtaatcgcggtatttactcatcggggtggcaatatgatcgtctatccagtgattcgccccctggtcgtgataatcaccgccgccagcgcctttttctgctgtcgcaccgccagtaaaccaggcgcgaacctgtttaatttttggtagggtcatgatgttctccattgttaactggcttgtaagtcaaagggacttttccatcccaacagacgactaatatccctggcgcaggcaatggccttgcccgccagataatcacggtattcttcattgatttgtaagcgggtaccgaccacgctgatcgcagcggtaagctcgttattggcgttaaacaccggcgcagcgacacaacggacatcggcgtaatcttcgccgttgtcatagctccagccctgacggcgaatacgcgccagttcttcgtgaagttgctgtggatgagtaatcgttgtgggtgtcgcctgctcccagaccagcccttcgataatactttgctgtaccgctgcaggttgccaggcaagcaggcatttacctattccggagcgataaaggctaaggctttttccttcatgggaacgcacgctgatagtggcactactctccactttcaaaatgtaataagcgctgccgttatcaataatccccaggtgacataacagcccggtggtatccatcagttgcgtcaaacgcggtcgagccagttcccggagatccatcttgcttaacgcatgaccggaaagctccaccagcctggtccacaaacaaaaattttcctggtgatcaaggctaagaaaacgctgacgcctgagttcattaagcagcaaataggccgtgcttttagggattcccaatgtgtcaatgatcgtcgcagcactacaggggccaatgcgggcaatcaaattgagaatatcaatagcccgtgtcagggcgggaactttgctactttccaacatactggactccagtcttagatactggaatcagtctcgttgctcagggggagtaaaattgtgaagcgcatcaaatcccgctcctcgtccagcagactggagaaattacgcacaaatttgtgaatcagcgcacggattttttcttattgagtacaacaggttggacaaattttgccggagggggaatgtgccggtgcagtaaaccggcacagagtggcggaatcagacagataaggtcatggactcaacaacctcaatccagccatgctcactggcgatatcctggccgtttaaccaacggcgcagcatattcagtgccatcattgcgcacacttcctgacggatagccaggctgtagcgcgtagtgctgaaacgcacacgcagagcgaaagtgccgtctggcgtggctagcgcaaagttgagatgctcgttctcgaaaccgctaacagccagtgccagcccggcaaaatggttggcccgccgttctgtaatccagtgcgcagtttgcgccagggtttcctcctgactaggaaccacttcacacgccagcaatggagcacctgcgcgagaaagttgcaaagccaataaaccaccggtgaattgctcgctcaacgtcaggctgaactggcggttttgcaattcgcgactgatctgcgcgggcagtccttcagtgccttcgaaaatcacgctctgtccggcaacacgtttaacatccagccacagtttttccatcgcctgttgctcgcttgccggtccggtgagtttcagttcgatgataggcatactggagcgatagcccattgttacgcccggcggcagttgtagagtgtccaggctttgtgccagatcgctttcgctacgaccaaaagtagtcaaacgcagacaaaccggcggctgcggtaaagaaaaacgctcgcgcaggcgcggcaggatttcgtgctcgaccatcaccttaaattcactcggtacgccgggagtaaagaacatcaggcaacgattaagctgcacggcaaaaccacaggcggtgcctaccgggttattgataaattcagcactggcaggcagctccgcttgtttacggttgctcggtgccattactcgtccacgttcgtggaaatagcgttccatctctttgagccaggcttcatgcagcaccaggccttcaccttttgctgtcgcagcggcgagtgcgcttaaatcatcgctggtcggtcccagcccgccgttaacgatcagcacatcggcgtgctgactacgttcgcgaagaatggtgactaagtcatcaaggttatcccccaccgtattgcggcgagataatggcaacccctgatgaaagaaaaaatcggccagccaggcagcgttagtgtcaacgatttgcccgtgtaacacttcatccccggtggataacatttccacttttaacatggttatctcctgcttttgttatcgaatcactataacgcaaagggagataaggcgtagtaagaaactgaatggcgcgacagaatgccgcgccggaagggatcagaaactggcgttaaccccaacatacgggccgtcagccacggcgttgtcgcggttaccgtctttaccgctcagattcaggtagcgataacccgcctcaatactgactggacgcataatggtgtaacgcgcgccagcattcgcttcttcataactttgaataccgctggagaggctatccggagagtagtaatactcgccaaacaaacggaagctgttgccaattttccactgcaaaccacctcctaccgctgcggcataaccttcatcgccgtaattcgggttggtgtaaacgccttttccgccaacggtcgccattaacggcccgagaggcagattcaaccccagccccacgccagcgacatcaccgtcgtcgtcgttatgtgtccagttaccgcttaacgccaggcccgtcgtttcagtcccaaaaccgacaccaatattggtgtattctttacccgcctgaccgctgatgctcattgcattgacgcttgcagaaaccaacagcattccggccagacctgctagcgcaatttttttcattatcccctttcccacaagcaattaatcaaaattcccaaagctgcgggattgtactgcctggcacagaggattcaatgagcgaaaaaaaggatctagtcacttattgtaactaaatacttcttaaataattaaatgccgaaaaaataaacacactttatcgatacacacaaaaataataataagtacagttatcatcgcaaaagagattactgtcactttcacatatttgtgagttaccgtattctcatggtttctttttatttataaggaatatccctgtgcgacaacggactattgtatgccctttgattcaaaatgatggtgcttatttgctgtgtaaaatggccgacgatcgcggcgttttccccggtcaatgggcgattagcggtggcggcgtggagcctggcgaacgaattgaagaggcactacgccgcgaaattcgcgaagaactgggagaacagctgcttttgacagaaatcacgccgtggaccttcagcgatgatattcgcaccaagacgtatgcagatggtcgcaaggaagagatttatatgatttacctgatttttgactgcgtttctgccaaccgagaagtgaaaataaacgaagagtttcaggactacgcgtgggtaaaacctgaagatctggtgcattatgatttgaatgtcgccacccgaaaaacgttacgtttgaaaggtcttctgtaacaatgatgacagccattactggctgtcagattgaaaatttagtggttaacgaattccccatccagataaactttgcctttttccacatgcatgactaaaccatccagataatcaggtttaaatgtcgcgtcacgcttatctttagcaatatatgtcaggcaatgattatgggtgaaaataacgatatttttatcaggcgctttgctttgtaagtccttaattgcactataaatctcattaccgcactgaagaagtcgtttatctaccgtcaattttttacccgcactaaaccaggtagcgctctgaatggtccggacggtattactggaataaagatcgaaatcagggatatcagcactaaaagcgttgcccagttcacgggcatcctgggtacctttaaccgtaatacctgttttatcactcaagcattgattggtactacggtcgcaacgttcagcatgacgaaacaaaacgacaaccgggtgctgctgtgccagtctggccagtgttttattgtcgatacgtggcaaaccattgctactccaggcggcatgagtacccagtccggcaattgcagcgagcgccagtaaaatgatgatatattttttactcttcaagctagagcggcaaaaagctaacacgtaaactccacctatagacaagcgcaaccagacaattaccgtgaaattgagctacatttctggcgataattcgcagttggtgtaatattaaaaatcctacgatgtcggcaaaatgcctcaaaattttgccaaatgcaaagcctaaataagaaaaaatataaaaatttcaatatttacgtctaatattagtttcttaaggttaagttaatattctatccttaaaatttcgctccaaatggcaaaatatacacaacactctttatagcaaatataagtggacaggtattcaatggcggaaggaaaagcaatgagtgaatttttgccttttagccgaccagcaatgggcgtggaggaactcgctgcagttaaagaggttctcgaatccggttggatcacaaccggtccgaagaatcaggcgcttgagcaagctttttgccagttgacgggaaatcagcatgccatcgcggtcagtagtgccaccgccggaatgcatatcacgctaatggcgttgaaaattggcaagggcgatgaagtgattacgccttccctgacctgggttagtaccctcaatatgatttccttgttgggtgcaacgccggtaatggtggatgtcgaccgcgatacgctgatggtcacgcctgaagctatcgagagtgccattacgccacgcactaaagccatcattccggtgcattatgccggtgcgccagcagatattgacgccattcgcgccattggcgaacgttacggcatcgcagttatcgaagatgctgcccatgccgtcggtacgtattacaaagggcgacatattggcgcaaaaggtaccgctatttttagttttcatgccattaaaaatattacctgtgctgaaggtggcctgattgtaactgataatgaaaaccttgcccgccagctacggatgctgaaatttcacggtctgggtgtcgatgcctatgacagacaaacctggggccgtgcaccgcaggctgaagtcttaacaccgggctataagtacaatctgaccgatattaacgccgcgattgccctgacacagttagtcaaattagagcacctcaacacccgtcggcgcgaaattgcccagcaatatcagcaagcactggcagctctcccctttcagccattaagccttcccgcctggccgcacgttcacgcctggcatctgtttattattcgtgtcgatgaacaacgttgtggtatcagtcgcgatgcgttgatggaagcgttaaaagaaagaggcattggtaccgggttacatttccgcgccgctcacacacaaaaatattatcgcgagcgttttcccacgctgagcttaccgaataccgaatggaatagcgaacgcatctgttctttgccgctgttcccggatatgactaccgccgatgccgaccatgtcatcacagcccttcagcaactcgcaggacaataagccatgtttgaaatccaccctgttaagaaagtcagcgtggttattcccgtttataacgagcaggaaagcttaccggaattaatcaggcgcaccaccacagcctgtgaaagcttggggaaagagtatgagatcctgctgattgatgacggcagtagcgataattccgcgcatatgctggtcgaagccagtcaagcggagaacagccatattgtgtctattttgcttaaccgcaattacgggcaacatagtgcgattatggcgggattcagtcacgttactggcgacttaattattacccttgatgccgatctccagaatccgccagaagaaatcccccgcctggtggcaaaagccgatgaaggttacgacgtggtagggactgtacgccagaaccgccaggacagctggtttcgtaaaaccgctagcaagatgattaaccggcttattcagcgcaccactggcaaagcgatgggtgattacggttgtatgctgcgcgcctatcgccgtcatattgtcgatgcgatgttgcactgccatgaacgcagcacctttatcccgattctggcgaatatcttcgcccgccgtgccattgaaattccagtacatcatgccgagcgtgagtttggtgaatccaaatacagttttatgcgcctgattaatttgatgtacgacctggtgacctgccttaccacaacgccgctacgtatgctgagtctgctcggcagcattattgcgattggaggttttagcattgcggtgctgctggtgattttacgcctgaccttcggaccacaatgggcggcagaaggcgtctttatgctatttgccgtgctgtttacttttattggcgctcagtttatcggcatgggattactcggtgaatatatcggcaggatctacaccgatgtccgcgcccgcccccgctattttgttcagcaagttatccgtccatccagcaaggaaaatgaataatgaaaaccgtcgtttttgcctaccacgatatgggatgcctcggtattgaagccctgctggctgccggttacgaaattagcgccatttttacccatactgataatcccggtgaaaaagccttttatggtagcgtggctcgtctggcggcggaaagaggcattccggtttatgcgccggataacgttaatcatccgctgtgggtggaacgcattgcccaactgagcccagatgtgattttctctttttattatcgccatcttatttacgacgaaattttgcagctcgctcccgcaggtgcatttaatctgcatggtagcctgttaccaaaatatcgtggtcgcgcgccgctgaactgggtgctggtcaacggtgaaacggaaactggcgttacattgcaccgaatggtgaaacgtgccgatgccggggccattgtggcgcaactgcgcattgccattgcgccagacgatatcgctattacgctgcatcataaattgtgccatgccgcgcgccagctactggaacagacattacccgccattaaacacggtaatattctggaaatcgcccagcgcgaaaacgaagccacctgttttggtcgcagaacgccggatgacagtttccttgaatggcataaaccggcatccgtactgcacaacatggtacgtgccgttgccgatccgtggccgggtgccttcagctatgttggcaatcagaaattcaccgtctggagcagccgtgttcatcctcatgccagcaaagcacagccggggagcgtgatttctgttgcgccactgctgattgcctgtggcgatggcgcgctggaaatcgtcaccggacaggcgggcgacggcattactatgcagggcagccaattagcgcagacgctgggcctggtgcaaggtagtcgcttgaatagccagcctgcctgcaccgcccgacgccgtacccgggtactcatcctcggggtgaatggctttattggcaaccatctgacagaacgcctgctgcgcgaagatcattatgaagtttacggtctggatattggcagcgatgcgataagccgttttctgaatcatccgcattttcactttgttgaaggcgatatcagtattcattccgaatggattgagtatcatgtcaaaaaatgtgatgtcgtcttgccgctggtggcgatagccacgccgattgaatatacccgcaacccgctgcgcgtatttgaactcgattttgaagagaatctgcgcattatccgctactgcgtgaagtaccgtaagcgaatcatcttcccgagtactagtgaagtttatgggatgtgtagcgataaatacttcgatgaggaccattctaatttaatcgtcggcccggtgaataaaccacgctggatttatagcgtaagtaaacaattacttgatcgggtgatctgggcctatggcgaaaaagagggtttacagttcaccctcttccgcccgtttaactggatgggaccacgactggataaccttaatgcagcgcgaattggcagctcccgcgctattacgcaactcattctcaatctggtagaaggtagtccgattaagctgattgatggcggaaaacaaaaacgctgctttactgatattcgcgatggtatcgaggcgttataccgcattatcgaaaatgcgggaaatcgctgcgacggtgaaattatcaacattggcaatcctgagaacgaagcgagcattgaggaactgggcgagatgctgctggcgagcttcgaaaaacatccgctgcgccatcatttcccaccgtttgcgggctttcgcgttgtcgaaagtagcagctactacggcaaaggatatcaggacgtagagcatcgtaaaccgagcatccgcaatgcccaccgctgcctggactgggagccgaaaattgatatgcaggaaaccatcgacgaaacgctggatttcttcctgcgcaccgttgatcttacggataaaccaagttgacctaagatcttacggataaaccatcatgaccaaagtaggcttacgcattgatgtcgatacctttcgtggcacccgtgaaggcgtgccgcgtctgctggaaatcttgagtaagcataatattcaggccagcatttttttcagcgtcggcccggacaatatgggccgccatctctggcgactggtgaagccacagtttttgtggaagatgctgcgcagtaacgcggcaagcctttatggctgggatattttactggcaggtacggcctggccaggtaaagagattggtcatgccaatgccgatatcattcgtgaagcggctaaacatcacgaagtcggcctgcacgcctgggatcaccatgcctggcaagcccgtagcggtaactgggatcggcaaacaatgatcgacgatattgcacgcggtcttcgcactctggaagagattatcggtcaaccggtaacctgttctgccgctgcgggctggcgtgccgaccagaaggtgatcgaagcaaaagaagcgttccatttgcgctacaacagcgattgtcgtggggccatgccgttccgtccattgctcgaaagtggaaaccctggcactgcgcaaattccggtgaccttacccacctgggatgaagtgattggtcgggatgtgaaagcagaagattttaacggttggttactcaaccgcatcctgcgagataaaggcacgccggtttataccattcatgcagaagttgaaggctgcgcttatcagcataattttgtggatctcctcaaacgcgcagctcaggaaggcgtgacattttgccctttaagcgaactgttaagtgagacgttgccgctcggacaagttgttcgcggaaatattgccggacgtgaaggctggctgggttgccaacaaattgcgggtagtcgctgatgaaaagcgtacgttaccttatcggcctcttcgcgtttattgcctgctattacctgttaccgatcagcacgcgtctgctctggcaacccgatgaaacgcgttatgcggaaatcagtcgagaaatgctggcatccggcgactggattgtgccccatctgttagggctacgttatttcgaaaaacccattgccggatactggattaacagcattgggcaatggctatttggcgcgaataactttggtgtgcgggcaggcgttatctttgcgaccctgttaactgccgcgctggtgacctggtttactctgcgcttatggcgcgataaacgtctggctctactcgccacagtaatttatctcagtttgtttattgtctatgccatcggcacttatgccgtgctcgatccgtttattgcattctggctggtggcgggaatgtgcagcttctggctggcaatgcaggcacagacgtggaaaggcaaaagcgcaggatttttactgctgggaatcacctgcggcatgggggtgatgaccaaaggttttctcgcccttgccgtgccggtattaagcgtgctgccatgggtagcgacgcaaaaacgctggaaagatctctttatttacggctggctggcggttatcagttgcgtactgacggttctcccttggggactggcgatagcgcagcgggagcctaacttctggcactattttttctgggttgagcatattcaacgctttgcactggatgatgcccaacatagagctccgttctggtactacgtgccggtcatcattgccggtagcctgccgtggctgggattactccccggtgcactgtacacaggctggaaaaaccgcaagcattccgcaaccgtctatttgttgagctggacgataatgccgctgctgtttttctccgtcgctaaaggtaaattgcccacctatattctttcctgctttgcatctctggcaatgctgatggcgcattacgctttgctggcagcaaaaaataatcctctggcgctgcggattaatggctggattaacatcgcttttggcgtcactggcattattgccacatttgtggtctccccgtggggaccaatgaacacgccggtgtggcaaaccttcgagagctataaagtcttttgtgcctggagcatttttagcctatgggcatttttcggctggtacaccttaacaaacgtcgaaaagacctggccttttgccgcgctttgcccgctggggctggcgttgctggtaggatttagtattcctgacagagttatggaaggaaaacatccgcaattttttgtcgagatgacacaagaaagtcttcagccaagccgctatattcttactgatagcgtcggtgttgccgcaggtctggcatggagcctgcaacgcgatgacatcatcatgtatcgccagacaggtgagttgaaatacggccttaattatccggatgcgaaagggagatttgtcagcggtgatgagttcgcaaactggcttaatcaacatcgtcaggaggggattattactctcgtgcttagcgttgaccgcgatgaagatatcaacagtctcgccattccgcccgcagatgccatcgatcgtcaggagcgtctggtgctgattcagtatcgtcccaaatgatctggctaacattagtctttgccagcttgcttagcgttgccgggcagttgtgtcagaaacaggcaacctgctttgtggcgataaacaaacggcgcaaacatatcgtgctgtggctgggactggcgctggcttgtcttggtcttgccatggtgctctggctgctggtcttgcagaacgtaccggtaggcattgcttacccgatgttaagtctgaattttgtctgggtgacgctggctgcagtaaaactgtggcacgaaccggtaagcccgcgtcactggtgtggggtggcgttcattattggcggcattgtgatcctcgggagtacggtgtaatgggcctgatgtggggattattcagcgtcattattgccagtgttgcgcaattaagcctgggttttgcggcgagtcatctgccgccgatgacgcacttatgggattttatcgcggctctgttagcttttggcctggatgcccggatactgttactcgggctgctgggttatctgctttccgttttttgttggtataaaacgcttcataaacttgcgctaagcaaagcctatgccttgctcagtatgagttatgtgctggtatggattgctagtatggtacttcccggctgggaagggacttttagcctgaaagcactactgggagtagcctgtattatgagcgggttgatgctgattttcctgcccacgacaaaacaacgttactgagttttccctgccactttacactgccgttcccactcatcggggctataactgcttgcgctgaggactttcaccgtatgcagcttttcacgattaatacaataaagcgcattctgcaaagggctgagtaaatcccccactttcacggcgaagtcactcttcacttcggcgatcatttttatcgcgccgccagcatcgcagagcataagtacatgtctgttatcttgtttattgcagcagctttttttgaccagccattccattgcattatcctgtttgctaagagttttcacatcaatttacagattaacagataaactctttatcaacggcaatggaatggcagaaatgagaagtgaaacggagggttaattattgctgacgttgcacccactcttttagcgcctgacgactaattttaataccgccgtttttcagctccggcggcagagttagccagcgcaccggttgttgaaaacgggccagcttatctttcacccattcactaagatcaacgctctcgtggtcatactccatcaccgccaccggtcgatgaccaaactccttgtcggcaacggggacgataaacacctgcaaaaccgcaggatgtgcagcaattacgcgctcgacttcttccggctgaataccctctccgccactgaagaatagattgtctaaacgtccgacaatggtcagcttgccattatgcatctcaccgcgatcgcgcgtagcgtaccagccttcgtcattaaccagactaaccagttgcccgttacgccagtaaccttctgccatactggcagcccgcagccacacttcattattaacgattttcacttcccgacccggcagcgggctaccaacgtctgccaggccgtcggcttctttcgcacacaccgtggaggcaaactcggtcagaccatagccgcaaaagcaacgaatcccctgctcgcgcgcctgttccgtcaactcgaccgggatagccgcgccgccaagtaacaccgctttcagggaaacggaactacggttaaccagcaaacgccagagttgtgttggcaccagactagcgtgagtacagcctgccagcatttgctccaatggctgtttatcacgtaccgtcatccgcgcaccagcgtataaccagcgccacataattccctgaccggagacgtgaaacagcggtaaagagagcaaccaatcatcgtgatcgccaaacggaatcaggcttaacacaccttgcgcactggcaagatgggcctgataagtatggacagcggctttcggcaaaccggtagaaccgctggtcaacgtcatactgcacagacgcgtcggctgccacgtagcggcatgtgcgccttcaaccagctgaatgtgcaggctcgttaatgccggaaacgtgttttccccatccggcaccagagcaaattgcagcgtcagattgggcagcaattcttcaagcaacggttgcggcagctgagggttcacgggcaacacccgcgccccgcattgcagtaacgccagccaggcgagcagcgtttgcggcgtattccacgcccgcaacatcacgccgctgccctcaaccaccccctgcaccgcaaatccggaggctaattcatcgacgcgagcacaaagctcgcgccagttgagttgctcgtcattaagacgtaaggcgatggtttctccccgcacttgccgccagtgacgccacggccagtcagagaagatcataacaaccgctccagtgcatcaacttccacgacaggcagcgtgctacccggccagcgacgtacctgctgcgcctgcatcagatccagcgtgtccagccctggaatggtgtccggcgttaaccaggcggcaatccgcgccagttgcgttaagcctaagctgctttcaatggaagaactgatcaccgccgtcagccccagcgcgtgcgccgcctgtacctgctcgcgtactttttccagactgcccgtgagcgtgggtttgataactaccgcgcgcacgccctcttcagccacaaaggcaaaatccggctcgcgcaggctttcatcccaggcaatggcaatgccggtttcacgggcaaacgctcggctatcatcgcgggttttgcacggctcttcgagaaacgcgatgcggtcgcgataatccgggttaacgtatttggcaaactgctgacctttcagcggtgtccaggcgcgatttgcgtcaagacgcaaatgcagatccggaattgcctccagcaacagattcaccaccatgccgtcgcgcaccgcttcgtacaatcccactttgaccttcgccactttctcgcctggcatatctgcaagtttgaggatcagatcgtccggatcgccattacacagcggtgccgcacggtagttggctgcttgcggcaacgtatctgtcagttctgccaatgcacagcttacgccaaaggccacggaaggcatctgcggtagctcgcaatcgcctgccagccagttatttacccaggcaagcagcacactttgcgcctcttcccaggtttcctgactgaagcccggcagtggggagatctccccccacccttcgcgctcgccttcacgcaggcaaacatacagcccgtcgcgggtttttaaccgcctgtcgcgcagaaccacccccgcgtccatggggatctgccagcggtatacctgcgcgctacgcattacggattccgtttgaatttgctgaagtcaggctgacgtttctggttgaaggcgttgcgaccttcctgaccttcttccgtcatgtagaacagcatggtggcgttgcccgccagctcctgcagccccgcctgcccgtcacagtcggcgttcagtgcagctttcaggcagcgcagcgccatcgggctgttttgcagcatttcgcggcaccaacggacggtttctttttccagatccgccagcggtaccacggtgttcacaaggcccatatccagcgcctgttttgcgtcgtactgacggcacaggaaccagatttcacgcgcttttttctgcccgacgatgcgagccatgtaggaagcgccccagccgccgtcgaaggaaccgactttcgggccagtctgaccgaagatggcattatctgccgcgatagtcaggtcgcacatcatgtgcagaacgtgaccgccgccgatggagtagccagccaccatcgcgacaaccggtttcggacaggtacggatctgacgctggaagtccagcacattcaggtgatgtacgccggaatcatctttatagccgccgtaatcaccacgcactttctggtcaccaccggagcagaacgctttatcgcctgcaccagtcagaatgatcacgccgatgttgtcgtcataacgcgcatctgccagcgcctggatcatctcttttaccgtcagaggacggaaggcattgcgcacctgcggacgattaatggtgatttttgcgataccgtcggtggatttttcataacgaatgtcctcgaaaccttcggagcagtcgtgccattcaaccggtgcgtaaagcattgcttcatcaggataaatcatattgtgtcctttagtcagaaacgcaagatctgcgccagacttgcgattacgccagcgggattttcccgatgcgcgttatgtccggcgcgaggaatgacatggcagtcggcagccagttccgccgccagggcgcggaatttgctgtcacgttcaccacataaataataaaacgcaaatgtgcgggcgctaaggttagcacgtaaatcaggctggacggcgagagaagtcgcctccagcatggcggcaagcgttgcgccattattgttgctgcgcagcgccaccagctcccggcgttgatcgtcattgagactggcaaaaacaggctgttgataccagtcggcaaataccgccgttaacggttctgtgagaaaacgctgcacccattggcgatcggaacgctgacgttccgcacgttgttcagcattttgcagccccggatgcccgccttcgacaataaccccacaaagccccgccagcccctggcaagccgccatcatcgccacccgtccaccaaggctgtaccccaccagccagaagtcaaggatgttgtaactaaccaaggttttacgcagtaagtcggtgacatcatcaaatccatcgacgctaatcgccgcgctaccaccgtgacctgggagatcaacatacaaccgactgtagtcggcaaacgcctcgcccacttcttgccattcgtggcaatcgccggaaaaaccgtgcaaaaacaccagccagggtaaacctggttttccgtgttttgcctgcgcgtgcaggatcataaatggcttacctgcgccagaagttgctggagcgtttgcgcaccatcggtgtcgttaaccaccatttcaatcaccgtggtggttggcgtgcgccaggcgtcggcaaatgccgtttcaagttcctgccagttttgcggacgatgatatttcagctcgaacatcgcggcggcgtgctcaaaatggacgttttgcggcatcagatagaaacgctcacgctcgctttgcggcgttggcaacaggctgaaaatttgcccgccgttgttgttcaccacaattaataccagcggcgcagaaacctgacgcaataacgccagcgcgttgagatcgtaaagtgcggagagatcgcccacaatcgccagcgtcggtttgccgcttgcccgctgaacgccggcggcggtgctaagcagcccgtcgataccgctggccccacggttgctgtacaccgggtaacctgccggaagttggctaagcgcatcaatcagacgtaccaccaggctgttaccaacaaacaattgcccctgttcaggcagatagtcgcagatgcgatgcgccagttgcgcttcgccaaacgcatcacggcgggcaataaccgcctgcattgcctgttccgccaggcgcgggatttcaacgcaccagggctggcgtttttctgccggatgcagctccagccagtcggcaatattggcaattaagcgacgtccgcgatggtgtgccggatcaagtcgcccttcaatgtcatcaacaatccagtactcttctggttcacagcttgcctgccattgcaggagccgtttccccgtcaggctgcttcccagttgcaccacaatttgcgcctgctgcagctcgctggtcgctttggcattgcctaaccaaagatcggcacacggcagcggctgcccggtttgactcagcacatcgccaatcagcggccagccaagagtttgcgcccacagggcaacttttttgccctcttccgcactcatgcgcccggcaaccaccacgccgcgcttttgtcgccagaagaaccagtcgcgctgtttttcactttccagacgaggcgcttcacgcagccacggtttgtcttcctgccaccagtcacccagacgctgttgccagctaagcccggtatcgtccatttcgccatacagcggttcagcaaacgggcagttgatatggactccccccgcatgaagcgtaccgagagcgtggtcgatggtagaaaccagccaacgtgcggggatatcctgggtcgggcgcggcaaactaatactgtgcgtggggtgagaggcgaacattcccggctggcgaattgcctgattcgcgccgcagtcaattagctccggcgggcgatcggcggttaagagaatcagtttttctccggttaacccggcttcaatcagtgccggatagagatttgccaccgccgtgccggaggtcacaatcaccgccaccggctgcttgctgactttcgccagccccagcgccagatgccccaacccacgctcatcgaaatgggtgtggtgaatgaatgcggaattctccgccgccgctaacgttaacggtgtagaacggctgcctggggcgatacagatgtgtctgacgccgtgacgcgttaatgcttccagaatgaccgccgcccagcgtcggttaaatgcgcttacactcatgagtttgtccggtatcaatattgcggctaagtataaggagctacaaaaatagattattgatatgaatcggtaatgatgcgactcattattattccatttgtaataaagtacgcagccctgccgctttgttgtcgatttcctgccactcttgctcggggtcggaaccacggacaatgcccgcgccagcatataatcgcacgacattgccgctaatttttgcactgcgcagggaaacgcagaattcgctttgttgtaaactgagatagcccgcagaaccggcgtaccattctcgggtgaacggttcgtgacgggcgataaactgtcgcgccagatcgcgcggtaagccagcaactgctgccgttggctgcaactgatgtaaacagatcacatcatccgctttgttgagactagtccagatacagcggcgaagatgctgcactttacgcagacgcagtacctgcggcggtaaaacatccagcgtctgggtatcggcctgtaatcgttgacagatatcttccaccaccagcatgttctcgcgctggtttttatcatccgccatcagccactctcctaactgctgcgcctgcttatcatcaggattatttgctactgttcccgccagcgcttcagtacgcagcgctttgtcacgccgccgccataaccgttccggactagagccaagaaaagcattttcgccatcaaaggccatgtaaaaatggtagcaattcagattcagtcgacgactggcagccatcatcgccgccgcgttgaccggacttgcgaaatgcaggtcagttgcccgagcgagcaccactttgtcgagctcaccttcggcgatggttttcgttgccagttcgattaattgcgtccagcccgttttgtccggccagtgttgttctcgcgtggtggttaaatgtaacccaggcaagggcttgatactcaccagtgtggcgataaattcttttgcctgaatcgcatcgtgctgaagggagctttcgctgaatagcgtcagccgcagcgtggctttaccgccacagcgtcgccattccaggcggggtaaaagtaaattgccctggctcgggtcaaaagcattcagcccccaaatgcgtaagtcggcgtgttccgggtgctggcgaagaaaacgttgtgcctggtccaagctcgtaaaacgggtaatcgcgcccaggacgacagcttcttcatcaccattacgttgttgccagtagaattgcgggtatgtttgctgactggccagccagctcaaggcatcaaaagcgtctttgagagggaaaggaatatcgataacccgaatgccgggtgtcgccggaatctcttggctcaaatggcgcagtagattttccagcgccgtagtaagactttgcacgcggacctctccctgttaaaagcctcacattatacggggtactacaaaaaaaatgcagtaccccggtgtagggaggttttaacggcgtgccagcaacagtcctagtaccagcccaacggccgcgcccacaccaattccttgccagggtttttcgtggacgtagtcatcagcacgataaactgcctgcttcgcccgatagtaataactgtcactagcctggctaacccgttttttcacatcatccagcgctttttctgcacgcgctttcagctcaacatatttctgatcggcgggatcgccagaggagcggagcacctcttccagtgtttcactaagcagcgtcaggtcgtcatcgatacgtgtatcaccaaactgattagacattctcgttctccatttgcgtaaaacctgtcactaactatagacaagggttgttgattacgcctgaattacctcgcgtgccatcccaatgtgtgggataccatcttcttcatagacctccgtcacagggataaaaccgaaactctggtagaagttttgcagatgcgcctgcgccccgaggtaaacaggcttatcaggccagtgatgcgtacatgtttcgagtgttttactcatcagctgctgccccactttttcgccacgcaacgcttcactgacaatcacccgacctataacgaccggctcaagatcatcatcacttttcagaatcctcgcatacgccaccagttcatcatttttccaaccgagaatatggcgattatcccccgtcaaatcatcaccatcgatatcctgataagggcaattctgctcgacaacaaacaccgcgcaacgcagttgtaataaggcataaagctgggaaacgcttaattcagagtgatgcagatcttgccattcaatcataatgctctccttttagatgtatgccttatactagccggaatattttttgaaacgtgatgaactcatggaattaatttttttaggtactagtgccggtgtgccaacccgcacgcgcaatgtcacggcaatattgcttaacctgcaacatccgacccagagcggactttggttgtttgactgcggtgaaggcacccagcatcagctactgcataccgcctttaaccctggaaaactggacaagatttttatcagtcaccttcatggcgatcatctttttggtttacccggcttgctgtgcagtcgttctatgagtggcattatccaacccttaacgatttatggtccgcaaggtatccgtgaatttgtggaaaccgcgctgcggattagcggcagttggaccgattatccgctggaaattgtcgaaattggcgctggcgaaattctcgatgatggcctgcgcaaagtaaccgcttatccgctggaacacccactggaatgttatggctatcgtattgaagaacatgataaaccgggtgcattaaatgcccaggcattaaaagctgctggcgtgccgcctggcccactgtttcaggaattaaaagcgggcaaaacaatcacgctggaagatggaaggcagattaacggcgcagattacttagctgctccagtgccaggtaaagcgctcgctattttcggcgataccggcccctgcgatgccgcacttgacctggctaaaggtgtcgatgtcatggtgcacgaagcgacgctggatataaccatggaagccaaagccaatagtcgcggccatagctctacacgccaggctgcgacactagcccgtgaggctggagtcggcaagctaatcattacccacgtcagcagccgctatgatgacaaaggttgtcagcacctgttacgtgaatgcaggagtattttcccggcgactgaactggcgaatgatttcaccgtgtttaacgtttaactctgcttattattaaaaacagggcgaaacttgccctgttatcgcaacccgcgctacatatatccacccacacaggcatattgagcgatttttgatatttattcatctccttacgcactatattcagagcaataagttgcctcttttcatcttgattcagcacaacctttgcaactaaaaggagcccatgatggttacagttgtcagcaattattgtcaattatctcaaacgcaactcagtcagacatttgcagaaaaatttactgtgaccgaggaattactgcagtctttaaaaaaaacagcgttatccggagatgaagaaagcattgagttactgcataatattgcgttaggttatgataaatttgggaaagaagctgaagatattctttaccatattgttagaaccccaacaaatgagaccctaagcattatccgacttatcaaaaatgcttgtttaaaattatataatctggcacatatcgcaaccaactcccccctcaaaagtcatgatagtgatgatctcctgttcaaaaaactattctcccctagcaaattaatgacaattatcggtgatgaaattcctcttatatctgaaaaacagagccttagtaaggtgcttttaaatgatgagaataatgaactgagtgatggtacaaacttctgggataaaaatcgtcaattaaccacagatgaaatagcttgctatcttcagaagatcgccgctaatgcaaaaaatactcaagtcaattatcctactggtctctacgtcccctactccaccagaactcacctggaagacgctctcaatgaaaatattaagagcgatccaagttggccgaatgaagtccagttattccccataaatactggcggacactggatattagttagcctacagaaaatagtaaataaaaaaaataataaactacaaataaaatgcgtcatattcaacagtttgcgtgcactaggctatgataaagaaaatagtcttaagcgtgtcattaatagttttaattctgaactcatgggagaaatgagcaataataatataaaagttcatttaaatgaaccagagataatatttttacatgccgatcttcagcaatacttaagccaaagttgcggtgcatttgtgtgcatggcagcccaggaagtgattgaacaaagggaaagcaattctgacagcgccccctatacgttattaaaaaaccatgctgacagatttaaaaaatatagtgcagaagagcagtacgaaattgattttcaacatcgactggcaaacagaaattgttatttagataaatatggcgatgcaaatatcaatcattattatagaaacttagaaataaaacacagtcaacccaaaaatagagcatccggcaaaagagtgagttaacatcattgttaattaattcgaccagtcagcaaatatgctgactggtcgaacatagtttgctaaacagtcatcactgactgatgtcagtcacaccatccgccagttcaatcaggcgaataaattccgccctgtaaccctgtggatcttccccttttgcctgctgagcccactgtttgatctgctgccaggaggtattgttcaggtattcagaaccgcgtaacttttgcccatatgcagctactgctgcgcgaaaacgcatatcttcagagggcgcgtttattgttggccccagcgggaattcaactaactgactttcttttccctgcgggtatttccagcgaatttttaaccaggccagttctttcgttttgtcgcttttcgctaatttgttatccggggcatagcgtaacttatcaatacttgctttttgcccgttcagcgttaattcgaataacaacgttatatgtttgcctgcgcctatatcccctgcatcaacgttgtcgttattaaaatgttccacccgaagttggcgcttttcataaccaatctgacggtattccgttacccacgcggggttaaactcaatttgcgctttgacatcttttgctacggtaatcaacatctgccgcatttcactattcaatactttctgcgcttcagagagggtatcaatgtagctgtagttgccgttaccaacatcggcaattcgcaccatcattgcctcgttgtaattgctattccccacgccaaacgtgctcagagtaacaccagactcccgctgttttttgaccatactttcaatgctttttggatcgtcaatgccaacgttaaagtcaccgtcagtggctaataaaatgcgattgatgccgcccttaataaaccccttcgtcgcctgctgataagccagttccagcccggcaccgccattggtactgccttcggcatccaggctatcaattgcggcattaatttccgccttatgactcccggagatagaaggcaatgcaatacgggagtcgccagcgtaggtcacgatggcaatgttatcctgctcacgaagttctttgaccaataatttcaagctagactggataagtggcaaacgttcatcagaaatcatactaccagaagtgtcgataagaaagaccagattagaagctggtaactcttcacttttgcgatctttcgccaggatatcaactttcagcaatgttcgctgttcattccatggtgcaggtgccaattcgtagcgcatagcgaaaggtattggcttagaggccggaatagattgtttgtctttgatatcccaatcagacgggaaataattgactatctcctccacccgcacagcgtctggcggaggtaacagcccttgattgaggaaacgccttacattcgcataactgccagtgtcaacgtcaagactaaacgtcgccaacggattttgcgctacctgcttaaccggattatcatcgaactgctggtagcgagcggttcctggatttgcgatatgtgtagcttttgctttagccgctcttgcaaatgttggcgcttcctgcaatcgcccctgtaaagcctgtttgtcactatattgttgcacttcttgctgggccaaggctttcgcggcggcggcgctttgctcagcctcttttattgcagcttgctgcgcggcaagcacttgctgctctgtgggagtactgggttgttgttgctgactttccttattctcaggttgcggcccacatccactcaaaatcaaactactcataagcaacatgattatatttttatttcgcatataaaatccttttaaataaactcaggcaccagacataaaatatactctttgtataatcctgctaatcttaataaaatacaatatcgaaacccatagcaaataatgattcaacaacgcaacccattaataatttgcatatgaaaaaaataatctttgcttttattatattatttgtgtttttactccctatgattattttttaccaaccctgggtcaatgcattaccgagtacgccccgacacgcaagtcctgagcaattagaaaaaacagttcgttatcttacacaaactgtgcatccacgtagtgccgacaatattgataatctgaataggtccgcagaatatataaaagaggtctttgtcagtagcggtgccagagttaccagccaggacgtccccattacgggtggcccctacaaaaacattgttgctgattatggtcctgccgatggaccgctgattattattggtgcgcattatgactctgccagcagttatgaaaacgatcaattgacctatacgccgggcgcggatgataacgccagcggtgtggcaggattactcgaactggcacgtttgttacatcagcaagtaccgaaaacaggcgtgcagctggtcgcctatgcgagcgaagaaccgcccttctttcgtagcgatgaaatggggagcgcggtgcatgcagctagccttgagcgtccagtgaaattaatgatagcactggagatgattggctattacgactctgcgcctggaagccagaattacccttacccggcaatgtcctggctttatcccgatcggggagactttattgccgtggtcggcagaatacaggatatcaacgccgttcgtcaggtaaaagcggcattgttgagttctcaggatttatctgtttattctatgaataccccagggtttattcccggtattgatttctctgaccacctgaattattggcaacacgatattcccgccataatgattactgacaccgctttttatcgtaataaacaataccacttgcccggtgataccgcagacagattgaattatcagaaaatggctcaggtagtggatggtgttataactttgttatacaacagtaaataataaaaatttctcgaggcgggtccagaaaaagcgacatgcacattttattttccctcatctgttttaagatgcgaaacatgaaattcaacggaggaaaaataaatgggaatgattggctattttgcagaaattgacagtgaaaagattaaccaactgcttgagtctactgaaaaacctttgatggataatatacatgacacgcttagtggattacgccgactggatattgataaacgctgggattttttacactttgggctgacaggcacctctgcttttgatcccgcgaagaatgatccgctgagtcgtgccgtgcttggtgaacacagcctcgaagatggcatagatggcttccttggattgacctggaatcaggagttagccgcgacaatcgaccgactggaaagtctggatcgaaatgaactgcgtaaacagttttccattaagcgactcaatgaaatggagatttatccgggagtgacctttagtgaagagttagaggggcaactctttgccagcatcatgcttgatatggaaaagctgattagcgcgtatcgacgtatgctgcgacaagggaatcatgcgctgacggttattgttgggtgatatagcttgatgcctgggggagaaagacccattagttaagatttacgccaggatcatcttgaaaaaatctttaaccatggtccggtttttatccccttgtataaatattactaaatgcttgcttagtcgcattgttaaatgcaataccgtatattcggtatgtaacagcgatatcctctgtgctggcaacgatctgtcatgcttgatgaaaacggaattgaacctgtcattaccaggtagataaaaagcctgttcaattttgggattattttttataactcgtgtctgttatggcgacacgggaaaacatcaatattgtccttcacaaattgcagtaatatagaatcaacctctcttgcaagttggtcacaatgtattataagcattttgaatatgtcatcctctgtaatctcgtgaaaattttcggccttgtcttttagctcatcatatcggattcttgcagtaaccattttttgggcgagttctaataaccccaaagcttgcaattgctggtgagtatgatcactttcaaaaaatatcccacactccattccttcccaaccaacatattcatgccattcataaaccagcataaatgtttgtaaaactggcggtaataattggatatctgcaaaaccaaaccaaaacttacgcttgagatcccactcatattcaatcgccaatgctatattgtttaaggcatctccggcatccttatttttacgcaaaatcaattccgtcagtgtatagcgttgttcatcaatacgccgaagagcttctgcaatatcatagtttgtagccaacaaaacattctctgcttcctgatgagtgacgtctgcttttgccgtcaatatattgatttggtcaatatgaaacaacttgatggcttcatcaacatcaccgccagtcctctctaacaaacgtctggcaacctggataccgacaggtacgttcttccgaagtttacgaatttcacttaaccattccatgtcaaacccctttaaatatttatgatattaaatataacaacgtctggataacgacccggcctgactgaatatctcacgttttcctgcttaacattcatgttatgatgctcttgaaactaataatacgtatggaattgtcactatttatctgctaatgaatagtaacaatgtcattcgtttgatgaatatattatttcagggaataattatgacacctttagaacgcattacccaacttgttaatatcaatggtgatgttaataatcctgatactcctcgtccattgttatctcttgaggatttttttattgacaataatatccatggtagtatatgttgcaatgtgattccagaacaatctccgcaagctatctatcaccattttctgaaaatacgtgagcgtaacaatgttagtgatgttttggtagaaattacgatgttcgatgacccagactggccctttagtgaaagtattttagttatcaccactgctagtccagaagaagttcagagctggtttgtagaagaaattgcccctgatgagtgctgggaaggatggagtgaagatacggagcatggatgggttgaagtccctgtgggtatgcatccggttacttgttggtgggattaaaacatttatataaacagataagcggatgtttacataaatttttatgtgaaggaacatgatgaaacttattcctcgcagtagtgatattagtcctggcattgatggaatttgcccggggccttttcctccgaacggatttaccgtacttacagatgcagcatatggtaacggagactgtttcggtttgtactggcctattggtcaggagcataaactacctatagtgtgcgaaacgtaccatgacgaatggcgaatcgtacctgccttttccagcattaagaagttcgaagaatggctggaagtgaatgatgatgatccccatgaaaatggcatcagcatcgaagatcaagactttgcagcaaatctcttccgtgttgctcggaaatgtcttagtacgggaaggcttgatgacgcactgccactgttacagcgagcaacagaacaattgcctgaagtcagcgaatattggttagcactggcaatccagtatcgccgatgtaaaaaaacagaagctgcagcacaggctgcgcttaatgcttatcttggcaattgggcatttggtgttcctgacaataaagtcattcatttgctgagtcaggccgcagatgtcccgaatttccaggatgatcctgtgattcagtgcattaaagaacaaggattagatcttagctttggaggaacaaaggaaaataataattaccccttgatgcagatgtgtgttgatacttattttgcgcagagaaaaccgcttcaggcattaaccctgttacataattatgcctggataatgtccagtgaaacgactgcatttcaggaacgctatgattttaatatcgatgaatggcgggcaaaattcaggcagttatgtttagagtattttggcgatagtcgtacacagttcacttaacgctctgcgtctatctactatcccttctttttcagaaaaaccgccgagcatgtcggcggctttctgacttacaaagtaacagattacatcagcggcattgccaaacgcacaatgctaatcagcggttgtggccatacacccagcaccagtaccaacagtgcagagatcagcacaacgataccgcccgcgctgtactgccagttacttggtgcatcgcgacccggttgttccggggcgtgaagatacaggctcaccgccacgcgcaggtagtagtagaggccgattgcgctaccgacaaccacggcacccaccagccaccacaagtgtgcctggacaccgaccgccagcacgtagaacttaccgataaagcccagcgtcatcgggataccggccagagacagcatcatcaccgtcatcactgccgcgaggatcggacgatgccagaacagaccgcggtaagagaacagggaatcagcatccgggccacgatacgggctggacatcaggctgaccacgccgaacgcgccgaggctgctgaacagataaccggccaggtaaacccctaccgcttccatgctcatctcgccggtttgcagcgcaatcagcgctaccagcagatagccgaggtgagagatagaactgtaaccgagcagacgtttgatattggtctggctcagcgccatcaggttaccgaagatgatggaggcaaaggcgataatcgccagcaccacgcgaatcgcttcgctgtcacccaccggtgcgtagaggaacagacgcatcaccacaccgaagatagcgattttgctcgccgtcgccaggaaagtggaaaccggcgcaggcgcgccctggtatacgtctggcgtccacaggtggaacggcaccagagagagtttgaagccgaggccaacaatcatcaggccgaaacctgccagcaacagcggctcgttgagcataccgtcgccaaggtttttacccaacgcgacaaagctcaggtcgccagactgcgcatacaccagcgccataccaaacagcaggaaagaagacgctgcggcagaaaggatggtgtatttgatactggcttccagactacgtttctggcggaaagcgtaaccgaccaggccaaacagcggcaaagagatcagttcgataccgaggaacagagacgccagatggttggcattcgccagcaggatcccgcccagcgcggcaattaacaccaacaggtagaactcatccttgttgtcgttatagccttcaagccacgggtaggcgaaagtacaggtggcgaggctcgccaacaataccagcccggtgtaaagcatggcgaaaccatcaacgcgcatcagcggcgtaacgtccatagcgcccgcctggccaacaaaccagagcgaaaccagcgccgcgttaagcccaataaccgagagcgtagcgttgaggaaatgattgcgtcgccacgcaatggagagcatcacaaccaccaccgtcaagccgacgatcagcaacggtagcagtgcgatcaggttttgtggagttattgtcatggcgatttacggccttgtagtagtaacggaattaacaaaccactgctggatattgccaatcgcggagtggctggtatccagaatcggctgcggatagaagcccagcagtaccagcagcaccaccagcaacaggatcataaacagctcacgcaggctcatccctggcagttcctggctggcaatctggcttttcgctttaccgaagtaagcgcgatgtaacatcgccaggctataaacagatgcaaagaccagcccaaaggtagagataacggtaatcaccggtacaacctggaagctgccgaacagaatcataaattcgccgacgaagttaccggtgccaggcatcccaagcgttgccaccgcaaagaacaggctcagtgctggcagccatttcatcttgctccacagaccgcccatcatgcgcatgtcgcgggtatggatacgttcataaagctgaccacaaagaataaacagacccgccgcgctcaaaccgtgcgcaatcatctggattaccgcgccctggtaggccaactggctgccggtgtagatagcaatcagcacgaagcccatgtgggaaacgctggtgtaggcgatcagacgtttgatatcggtctgggcgaaggccatccacgcaccgtagaagatgccgataacacccagccacatagcaattggcgcgaactctgcgctcgcgttcgggaacagcggcagggagaaacgcagcaaaccgtaagcggcagttttcagcaagatccccgcgaggtcaacggaaccggcggtcggagcctgggagtgcgcatccggcagccagccatgcagcggaaccaccggcattttgactgcgaaggcgatgaagaagcccagcattaacaggtattccacaccactggacattggcgtattcagcagctcttcatagttgaaggtccagacgccggtcgcattgtagtgaacaaaaaccagcgccaggatggcaatcaacatcaccaggccactcgcctgggtgtaaatgaagaacttggttgccgccgtgatacgcgttttaccgtcagaggctttatgcccccacagtgcgatcaggaagtacatcggcaccagcatcatttcccagaagaagaagaacaggaacatgtcgatggcaaggaacacgccgataacgccgcccaggatccacatcaggttgaggtggaagaagccctgatatttttcgatctctttccagctacatagtaccgccagcacaccgagcagaccggtcagcacgaccatcagcaggctcagcccgtcaatggcgagatgaatagagataccaaaacgcgggatccacggcatgtcgaattcagactgccactgcggaattccggcggattgcgtcagactataaccgccctgcaaccacagttgcaggctcagcgccagcgtcaatcccatggtgatcagcgcgatccagcgtggcaccttgacgccaaagcgttcggtctgccagcacaggaagccgccaataaagggaattaatattagccagggtagtaacatggcgatctttattccttgtaaaagtcccgtcaggaccggattttcaacgaattctcacgacagaaaattctcttcggactgggggtagtgtcggatgcaccgcgaaggcggcttatccgacctacgttcttatatgcccaggggcaatcccacaatccttaactcaacgcagtaccatcaacagtgccagcaccacgaccgcaccgatgctcatggatgccacataccagcgcagatagccgttctcacttaacagcagacctttacctgcaaagcgggaaaggacagccgggatgttcatcatactgttcagcggatcgcgtttcagcaaccaggcaatacccaggaacggcttgacgaacactttgtcatacagccagtcaaatccccaggcgttgtaccaccaggtgcccagcagacggcccggcgcactgttggcgatggaggtcaccagagtacgtttacccagccacagccaggctgccagcagaatgccgaccaccgcgaccacgccagaggtaatttccagggtcaacatgctgccgtgcgccagttccgtcgtttgcggaagcacgccctgcagcggcggtacaatcagtgcgccaacgaaggtggaaaggatcagcagcacaatcagcggcaggctgtgagttacccctttcacggcgtgagcgtgaatttgttcttttccgtggaagacgatgaaaatcatacggaaggtgtagaggctggtcataaacgcaccgaccagacctgccaccatcagattgatatgaccattcgccatcgcacccgcgaggatctcatccttactgaagaagcccgcagtgaccagcggtagtgcgctcagtgctgcgccgcccaccaggaagcagagataaaccagcggaatagatttacgcagaccgcccatcttgaagatgttctgttcgtgatggcaggccagaatgacggaaccggatgccaggaacagcagcgctttaaagaacgcgtgggtcatcaagtggaaaatcgccgcatcccatgcctgcacgccaagcgcgaggaacatgtagccaatctggctcatggtagagtaagcgagaacacgtttgatgtcggtctgtaccagcgcggcaaaaccggccagcagcagcgtaaccgccccgacaatacccaccagatgcagaacttccggcgtcatcaggaacaggccgtgggtacgggcgatcaggtagacacccgcggttaccatggttgcggcgtggatcagcgcggagacaggcgtcgggcccgccatcgcgtcggcaagccatgtctgcaacggcaactgcgcagatttaccgaccgcaccgcccagcagcatcagcgtcgcccacatcagcatgttattgccgtcagcaaagtgcgctggtgccagttccaccatttcgcggaagttcagggtgcccagttcgttgtaaagaatgaacagtgcgaaagcgaggaacacgtcacccacacgggtcacgacgaacgctttcattgccgctgcgccattcttcggatcggtgtaatagaacccgatcagcagataggagcacaggcccacgccttcccagccgaggtacatcagcagcaggttgtcggcaagcaccagaaccaccatgctggcgatgaacaggttggtgtaagcgaagaagcgagagtagccctcttcaccgcgcatataccaggaggcgtacatgtgaataaggaaacccacaccagtgaccacgctgagcatggtcaggctcaggccgtccagcaccaggttaaaaccgatgttaaagtcgcctacgctcatccacgtccacagcggctggctgtatgtctgctcgccgttagcgaagaaatcaacgccgataaaggcggttaccagcgccgccaggcccacagagcctacgccgacgatcgcgctgacgttttcagaccagcgcccacgggagaatgccagcaggacgaagccaatcaatggcaaaataatggttaaggcaagcatgttcatccgcgcatctcacttacactatcgatgttcaggttctggcgacgacggtgaagttgcagcagcagcgcaaggccgatactcgcttctgccgccgcgaggctgatggcgagaatgtacatcacctgaccgtcggtctggccccagtagcttccggcgaccacgaaggccagcgcggaggcgttaatcatgatttccagaccaatcaacataaacagcagattgcgacggataaccagaccggttaagccaagaacgaataagattgccgcgaggatcagtccatgttgtaaggggatcatgcgtgctcctccgtttttcttttcgcgctgtcgtctttacgattgctcagcacttcacccgcacgctcttcacgaccgacgtggaaggccacaaccagacctgcgagcagcagcatagaagccagttccaccgccagtacgtaaggcccgaacagcgtaatacccactgctttagcactgattggcgtaccgtcgataccctgatcgttaacaccgaggatggcgtaaacaatcaccaccagcatgatggcgctcaaaattgccggaccaatccacacctgcggtttcagccactggcgttcctgttcgatttcactaccgcccaggttgagcatcatcaccacgaacacgaacagcaccataatggcacccgcgtagacgataatttccagcgcaccggcgaagtaagcgcccagactgaagaacaccccggaaatcgccagcaggctaataatcaggtacagcagtgcgtgtaccggattggtatgggtgatcactcgcaaggtcgcaagtatggctatcaggccacagatataaaaagcgaactccattgcccctctccttacggtaacaggctcttgacgtcgataggcttggcttcgttctctgcttcgcccttatctttgccgtcgattgccatacctgccatccggtagaagttatattccgggtatttgcccggaccggagatcagcagatcctctttctcgtaaaccagatcctggcgcttgtattcccccatttcgaaatccggggttaactgaatcgccgtggtcggacaggcttcttcgcacagaccacagaaaatgcagcgactgaagttgatgcggaaaaattccgggtaccagcgaccgtctttggtttctgctttttgcaggctgatacagccgaccgggcaggctaccgcgcagaggttacaggctacgcaacgctcttcgccgtccgggtcgcgggtcagaacgatacgaccacgataacggggcggcagatagaccggctcttccgggtacattcgcgtttcgcgtttggcgaacgcgtgcaggccgatcatccagatactacgaacctgggtgccgaaacctactaacaattcttttaaggtcatggtcttattgccccttattgcgcctgccagagaatgacagccgccgttaccagcaagttgatcagcgtcagcggcaggcagattttccagccgaaggacattacctggtcataacgcggacgcggtaagctcgcacgaatcaaaatgaacatcatcataaagaacgcggttttcagcgcgaaccagatgaatggcggtaacaacgggccttgccagccaccgaagaacagcgtcaccatcaatgcagagatggtcacaatcccgatgtactcacccacgaagaacagaccgaacttcataccggaatattcaatgtggtaaccatccgccagttcctgctcggcttccggctggtcaaacgggtgacggtgacataccgccacgcccgcgatggcaaaggtaataaaaccaaagaattgcgggataacgttccacacatgcgcctggctgttgacgatgtcggtcatgttgaaactaccggcctgcgccaccacgcccatcaaggaaagcccgaggaacacttcgtagctcagggtctgcgcagaagcacgcatcgcacccagcaagctgtatttgttgttactactccagcccgcaaacagcaccgcgtaaaccgccagacctgccatcatcaggaagaacaaaatcccgatgttcaggtcggcaaccacccaacccggactgactggcacaatcgcaaaggccagcagcaggctggtaaaggcaatcatcggtgccagggtaaagatgacgcgatcgctgaatttcgggatccagtcttctttaaagaacattttgatcatgtccgcaaccagctggaggctaccgccccagccaacacggttaggtccgtaacggttctggaacagacccagcaggcgacgttcgccaaagctcatgaatgccccgcaggtgacaaccaccagcaggatcaccaccgctttgaggatggtcagcaggatctcaatcagttccggacttatccaactcattgttgtgcctccttgagatcctcaagatgcgcgccagccagcaccggagcaatgccggacatacccatcggcaagcccacctgccctgccgtcagtccttcggcgatttcaaccggcagcgtgaccgtgttgccatcgtaactaaaggagacgcgtgtacctgcgttcacacccaacttcgcggcatccgctgggttgagtttgatgtacggctgcggcatacggctctggaagaccggagcacgctgactcaattcatcgctgccaaacaggtggtaatacggcgcgatacgccatttcccgtcctgcggctggaagcgtgccggtacgctggtgaagtaatccagaccattttcgctggtttcaaacagacgcacgcccggatcgccaaagcgcagtttgccgcccacttcgtcctggaatttgttccacgcctgcggggagttccagcccggcgcccaggcaaacggcacttggctacggtgcgcagtcggctggttgttaccttccatgctgaaggtgaacatggtgtcaatatcctgcggctgacgcggctcatgaacgctgatattggcgcgcatggcggtacgaccgctgtaacggtgcggttcacgggccagtttctgcccacgaatacggaatgtcgcatccggcgcagcatctttgatacctgccagttccgggattttcgccacaacagcgtcaatcacatggtcgagctgcgtccagtccacttcacggctcagcagggtgctgtgcaggctgtgtaaccagcgccagctttccagcatgacagttttgctgtcgtaataagcaggatcgtaaacctggaagaaacgttgggcgcggccttcgttgttgatcaccgtaccgtcgctttcagcaaagctggcagcagaaagtaccagatgggcgttttccataatcgctgtgcgttgatgatcaaccaccatcaccagcggtgctttagccagcgcagcattcacgcggatagcagaagcgtgacgatgcagatcgttttccaacaccaccaccgcgtcggcgcgtccggtttccagttcggttaacgcttcttcaaggctaccgccacccataatgcccagccccatgctgttgacggaacgggcaatcatggtgataccgacgtcagcgccgcgacctttcagggctttcgcgacgttagccgccgcctgaatcacctctaagctaccggcgttcgtcccggagataatcaacggtttcttcgcacctgccagtgcctgcacgatgacgtcgattttgctttgcagctcaggttcgataccgtcaaccgctggtgcagagttatccagcgcatgggcgatggcaaaacctaaacgcgcctgatcttcaaccggtgcgcggtaagtccacgccgcgatatcatccagacgggtgtcatcaacgttggtaacaaacagcggatgcttcgcacgttgaccgatgttgaggattgccgcaatctgccagtcagccactttctgtgctgccgccatttcgcgcgctttacctttcacagcctgacgcactgccagcgcgacgcgcgcgccggtctgggtaacgtcttcgcccagcaccagtaccgcatcgtaagattcgatttcgcgcagagccggagtataaatgccgccttcacgcagcactttcagcgccagttgcagacgttcctgctcaccgtgagcgataccggtgtagaagttttcttcgcccaccagttcacgcagcgcaaagttgctttccacgctggcacgcggagaaccaataccgatcactttcttgctctgacgcagaatatctgccgcgccctgcattgcctgttcggcgttgagggtaatgaaatcatcgccacgacgctgtactggctgacgcggacgatccttcaggttgacgtaaccgtaaccgaaacgaccacggtcgcagaggaagtagtggtttaccgtaccgttgtaacggttttcgatacgacgcagttcgccgtaacgttcaccggggctgatgttacagccgatggaacattgctggcagatgctcggcgcaaactgcatatcccatttacggttgtaacgctcggagtgcgttttgtcggtaaatacgccggtcgggcaaatttcgaccaggttaccggaaaattcgctttccagcgtgccgtcttccgggcgaccgaagtagacgttgtcgtgcgcaccgtaaacgcccagatctgtaccgtcagcgtaatctttgtagtaacgcacacagcggtagcaggcgatgcagcggttcatttcgtgagagatgaatggccccaaatcctgattacggtgggtacgtttggtgaaacggtagcgacggaagctgtgtccggtcatcacaatcatatcctgaagatggcagttaccgccctcttcacataccggacagtcgtgcgggtggttggtcatcaaccactcgaccacgctttcacggaactgtttcgcttcttcgtcgtcaatggaaataaaggtgccatcggaagccggtgtcatacaggacatcaccaggcgaccacgcgtgtcttccgcgttttggtattgcttcaccgcacactggcggcaagcaccgacacttcccagcgccggatgccagcaaaagtaaggaatatcaaggcccagagacagacaagcttccagcaggttgtccgctccgttgacctcgtattctttgccgtctacatgaattgtagccattagcatgcttccagttttctcagtcagagactgagcgttaatcgaaattcggttaccagcgctctttcagcaggttcggctgaatcccattaatcaaatgggtattgctgaacggctgtttgattcccgcctcaaattcttcgcggaaatatttgatggcgctctgtaacggctccactgcaccaggtgcgtgggcacagaaagttttacccgggcctaagaatcgacacagttgctcaagtgtttcgatatcgcccggctgaccttcaccacgctccagcgcacgcagaattttcacgctccacggcagaccgtcgcggcacggcgtacaccagccgcaggactcacgggcgaaaaactcttccaggttacgcaccaggctcaccatgttgatctcatggtcaaccgccatcgccagcgccgtacccagacggctgcccgctttaccgatactttcgaattccatcggcagatcaaggtgcgcttcggtcaggaagtcagtccccgcgccgcctggctgccaggctttaaatttcagaccatcacgcataccaccggcgtaatcttcgaggatctcgcgtgcggtggtgccgaacggcagttcccacagtcccggatttttcacccgaccggagaagcccatcagcttggtgccagcatctttacttttgctgatgttctgataccactccacgccgttagcgaggatcgccggaacgttacacagggtttcgacgttgttgacacaggtcggtttaccccatgcgccggaggttgccgggaagggtggcttgctgcgtgggttagcacgacgtccttccagggagttgattaacgctgtttcttccccgcagatgtagcgccctgccccggtatggacgaacagttcgaaatcgaaacctgttcccataatgtttttgccaagcagacccgcttcggtggcttcggcaatggcacggcgcagattaactgccgcttcgatatattcgccacgcaggaagatgtagccacggtaagctttcagcgcaaacgcggagatgagcataccttccaccagcaggtgcggcagttgctccatcaacaggcggtctttataggtgcccggctccatttcatcggcattacacagcaggtaacggatgttcatggattcgtctttcggcatcaggctccatttcaggccagtgctgaagcccgcgccgccgcgccctttcagaccagcgtcttttacctgattaacgatttcgtccggagacagcccggtcagcgccttacgcgcgccttcgtaaccgtttttgctgcggtattcgtccagccacactggctgtttgtcatcgcgcagacgccaggtcagcggatgcgtttcgggagtacggataatgtttttcatttataccgctccagcagttcagggatcgcttccggggtcagatgcgcgtgagtgtcctcatcgatcatcatgtttggccctttatcacagttccccaggcagcaagttggcagcagcgtaaagcggccatcaaatgtcgtttgccctggtttgatgttcagctttttctcgagcgccgcctgaataccctgataaccgttgatatgacagaccacgctgtcacaataacggatcacatggcgaccaaccggctggcggaagatctgactgtagaacgttgccacaccttcgacgtcgcttgccggaatacccagcacatcggcgatcgcgtggatcgcaccatccggcacccagccacgctgcttctgaacgattttcagcgcttcaatggacgccgcacgcgggtcttcgtagtggtgcatctcgtgctcgatcgcttcacgctctgccgcactcagctcaaaagcctcggtttgtggttgttgattctcgtgcataattagcggtccacatcactcataacaaaatcgatactgcccagataaacaatcaggtcagacaccaggctgccgcggatcgccgccggaatttgctgcaaatgcgcaaagctcggggtacgaacacgggtgcggtaactcatggtgctgccgtcgctggtcaggtagtaactgttgatccctttggtcgcctcaatcatctggaaagattcattggcaggcatcaccggaccccagctcacttgcaggaagtgggtgatcagggtttcgatatgttgcagcgtgcgctctttcggcggcggcgtggtcagcgggtgatccgctttgaacgggccttccggcatgttgttgaggcactgctcaagaatgcgcagactctggcgcagctcttccactttaagcattacgcgggtgtagcagtcagaaacgccaccacccaccgggatttcaaagtcgaagttttcatagccagaataaggacgcgccttacgcacgtcgaagtcgatcccggtagcacgcaggcccgcgccagtggtgccccactccagcgcctctttcgcgccataggcggcaacgccctgggaacgacctttcagaatggtgttttgcagcgccgctttctcgtaagacgccagacgtttcggcatccagtcgaggaactcacgcagcaggcgatcccagccgcgcggcaggtcgtgcgctacgccgccaatacggaaccacgccgggtgcatacggaaaccagtgattgcttccaccagatcgtaaattttctgacgatcggtaaaggcgaagaacactggcgtcattgcgccgacgtcctgaataaaggtgctgatatacagcaggtgactgttgatgcggaacagttcggagagcataacgcgaatgacgttaacgcgatccggcacggtgatcccggccagtttctctaccgccagcacgtaaggcatttcgttaacgcagccgccgaggtattcgatacggtcagtatacggaatgtagctgtgccaggactggcgttcgcccattttctccgcaccacggtggtggtaaccgatgtctggtacgcagtcgacaatctcttcgccatcgagttgcaaaacgatacggaaagccccgtgcgcgctcgggtggttcggaccgaggttgaggaacatgaagtcctcgttttcggtgccgcgcttcatcccccactcttccggtttgaaggtcagggcttccatctccagatcctgtttggctttggtcagctcaaacgggctgaattcggtagcgcgcgccggataatctttacgcagcgggtgacctttccaggtttgcggcatcatgatgcgtcgcaggttcgggtgaccgtcgaaagtaatgccaaacagatcccaggtttcacgctcataccagttagcgttcgggaacagtttggtgaaggtcggtacgtgcaggtcgttttctgccagcgccaccttcagcatgatgtcgcggttacgatcgatagaaatcagatggtagaaaacggaaaaatccgcggcaggtaacccttcgcggtgtgtgcgcagacgttcgtccatgccgtgtaagtcaaacagcatgacgtaaggtttcggcagtttctttaagaaatcgccaacttccagtaattgttcacgcttgatccacacaacgggaaccccggtgcgagtcgcctgaacagtaaaggcatccggcccaaaacggttgcgcagttcgccaatcaccggatcatcaagatgatcgcgggtctgccaggcgggttcttgcgcggttaagtcggtcatattgttcaccattgcaaatggtccgtggtgactgtcggcgcagtaagcttcgcgaaatagatttaggaataagcgaagaaaaatccctttgccgacaggcgcaaattaaatctcgtcaggtgtacgcaggttagttacggcaatgcgttcaccgcgcttgcgttcgcgctcactttgcatattggcgcgataaacgccctgatcgccaaccacccaggagagcggacgacgttctttgccgatagattcctgcaacagcatcagtgcctgcatgtacgcttcaggacgcggcgggcagcccgggatatacacatcaaccgggatgaatttatcgacgccctgcacaacggaataaatatcgtacataccaccagagttggcacaggcacccatactgataacccattttggttccagcatctggtcatacagacgctgaataaccggtgccattttggtaaagcaggttcctgcaaccaccatcaggtcagcctgacgcgggctagcacgcaatacttctgcgccaaaacgcgccacgtcatgcaccgcggtaaagctagtcaccatctcaacgtaacagcaggaaagaccgaagttatacggccaaatactgtttttacgaccccagttaaccatgtcattgagcttgcccataaacacgtttttgttaacttcttgctccagagggtcggttacgatctcctgcttttgcagggggtaacggtcgttctcaccgttgggatctatgcgggtgagcgtataatccatcttaatgcctcgcggttagcgttgacgattagcgatactgttcgtttccgggttcatacgctcgcggcgactacgcgcgggcgtccagtccagcgcgccaatacgcaccagataaaccagacctgccagtaacacaaaaataaaaattgcagcttccacaaagcctacccagccgctttcgcggatagaggtactccatgcgaacagatacagcgcttcaacgtcgaagataacgaagaacatggccaccagataaaacttggcggacaggcgtaagcgggcggagccgacgctgtcgataccggattcaaacggcacgtttttgctcctcgcgcgtgcgcgaccgcctaaaaaccaaccgcctaccagcatcaggcaacacaggccaatggcaacgataagaaagatagcgaatgcccagtgatgagcgatgacttcagtggatgtactcatactcattgcttactcatcaaaagtagcgccagattcactgctcttcacggcagatggacgccacatcgattcatggggaggaataaaaaaaaccttacaatcactgtagaaattcttttatacagctaattgatgtggttttttactcctttctataaccttttgtcaactttaacaaaagtttcttcacattagtttacataatatcaacaccattagcatttaatgccctttcaccccagatccttgacgactccaggataattagatgttgttgaatcgtgtccgttgtgaagcaatggaaaaaatacgggtctattttgacaggaatttgtgtcgattcctccccccaaaagagagtattttcttgatctgtgacacgcttttgtcattccataacaaaaacgcagcaacaaatttacgtattttttaacatcattgtagcaggtgatttttttcaggcgattatttgtgcgttcgggacgtgaatctctggtggttgaaaaatgaacagttttgtacgttctgcactatgcgatgaaggatttttactaaaaaaaagccgctggggtttaaaacacccccagcggctcgttttttacactattgtctcaggaattatctatcgtccgtcgattactcgatatccctttcaatcaacaaactatcatccccttccggagcagacattgggctgtattgccacggattatggtagctctccatcgcctgatagatcacctgggccagctcattattactggacggatcatagcacagcaaatattcggtatcaggtagcggcggtaagccatctactccactcagcacacgcaggtccgggctcatcatctcaaccggccttgccgtcacgccaagaccggctttcactgccgcacgaacggccggaagcgtgctggcgacataagccagtcgccatggaatatctgctttattaagcgtcgccagcaccatatcgcgaaacgggctaggatcatccagcaatacaagagggatcggctcgcctttttgcaatatgtattccgctgcgcagtaccagtgtgttgggctggtacgcaggttcaatgccttaaacgcactaggacgatgggtggttaccatcaaatccacttcctgggattccagcatttctgccatataggcattacgtttaacgcggacatccagcgctaatttcggataaacgctactcacgcgatttaacaggaaaggtaagatcgtatcggcagattcatcactagcaccgatagttaatacgccctgaagattactgaacattaaactactgcaggcctcatcattaaaacgcaggattttcctggcgtaaccaagaagttgaatgccatgttcagttaacagtttgttgcgaccgtgacgagcgaacagttctttcccaacgagttgttccagacgctgcatttgctgacttacggcggactgagtacgacacacagcggcagctgcggcagcaaaagtgttcagatcggcaacagcaacaaatgttctcagcagatcgaggtcgaggttaattatcggacgatttgcacttatcatatattatcacttactggcggctcatactgagctggttaatgctgtgcacacacaaacaagcaattccatttgtaatgtgcctccctggcagtttcatccggaacccggacgaaagtaaaaatgcatatgagttgcactaaaaaagcgactcacattgttccgttataatgcctgaagtagatcacagaatatatcttcagggatcgcatatctattaagttactcactcttttctatttatgacatgcgcgtgtttgtataaatgtaaatgtgagtccttgttccactctcgtgcagcatcgctggtcatacgcgaacacgtaccaacagcaatggtgaggcggcatcaagagcagggatccgtcatttatccgagcattttaccccaaaaaccttttatttataagggtcattgcgaattatctgatgcaaagttatgttatgttaggcaaagtaatcttctattattaataagcacatcaaaacctttttgaatattaaataataattaattagcatcatcctcattcattaattccgcttaacaatagtttcacaccttgcccccattgcgacacctcggaaatcatcacgcagttaaactctccgtaatgaggaaatatcatcatcgcgtttcattagtgaattcttaaatgaggcattttcacacaattatcttacagataaaaaaaccagacttacaattaagaatcagaacaattcactatataacattgcatgtaaagcatatacacctcattattttgtcattattaagttattaacagcacaatcgagccttcccctctggcaaaatcttattctgcagaccttcaaaacaccgtcctgggggagtacattgttctaagctgacttccacggcagggagtggcgataacagcaaaaaaggtcaagattcatgtcccccattgaaaaatccagcaaattagagaatgtctgttatgacatccgtggtccggtgctgaaagaagcaaaacgcctggaagaagaaggtaacaaggtactgaaactgaacatcggcaacccagccccgttcggttttgacgcgccagatgaaatcctcgttgacgtgatacgcaacctgcctaccgctcaagggtattgcgattccaaaggtctttactccgcgcgtaaagccatcatgcagcactaccaggctcgtggcatgcgtgatgttaccgtggaagatatttacatcggcaatggtgtaagcgagcttatcgttcaggcaatgcaggcattgctgaacagcggggacgaaatgttggttcctgcaccagattacccactctggaccgcggcggttagcctttccagcggtaaagcggtgcattatctttgcgatgaatcctctgactggttcccggacctcgatgatattcgcgctaaaattacgcctcgtacgcgtgggatcgttattatcaacccaaataacccaaccggcgcggtatattccaaagagcttttaatggagattgtggagattgcacgtcagcataatctcattatcttcgccgatgaaatttatgacaaaattctctacgacgacgctgagcatcacagtattgcgccgctggcacctgacctgctgaccattacctttaacggactgagcaaaacgtaccgcgttgcaggcttccgtcaggggtggatggtgttgaacgggccgaaaaaacacgccaaaggctacatcgaaggtctggaaatgctggctagtatgcgcctgtgtgctaacgttcctgcgcaacacgccattcagaccgcgctaggtggttatcagagcatcagtgaatttattacccctggcggtcgtctttatgagcagcgtaaccgcgcgtgggaactgatcaacgatattccgggcgtttcctgcgtgaaacctcgtggtgcgctgtatatgttcccgaaaatcgacgccaaacgctttaacattcacgacgatcagaaaatggtgttggatttcctgttgcaggaaaaagttctgttggtgcaagggacggcattcaactggccgtggccggatcacttccgcattgtcacgctaccgcgtgtcgatgatatcgagctgtctttgagcaagttcgcgcgtttcctttctggttatcatcagctgtaatcttaatttcactgccggagattgcatccggcagcgttatcccgccacaatgacctgatgatgtcatcatacgtaaggtcactatgaaacagagccatttttttgcccatctctcccgcctgaaactcattaaccgctggccgctcatgcgcaacgtgcggacggaaaatgtgtccgaacacagtttgcaggtagcgatggtcgcccatgcgctggcagctatcaaaaatcgaaaatttggcggtaatgtcaacgccgaacgtatcgctttactggcgatgtaccacgatgccagtgaagtgctcaccggcgatctccctactccggtgaaatacttcaatagccaaatcgctcaggagtacaaggctattgaaaaaatcgctcagcaaaaactggtcgatatggttccggaagagctgcgggatatctttgcgccgttaattgacgagcatgcatatagcgatgaagaaaaaagcctggtgaaacaggcagatgcactgtgtgcatatctgaaatgtctggaagaactcgcggccggaaataatgaattcttgctggcaaaaacgcgactggaagcgacgcttgaagcgcgtcgcagccaggagatggactacttcatggaaatatttgttcccagcttccatcttagcctcgatgagattagccaggatagtccgctgtaagcagccggagtctgcgtcgcatcaggcaataagcgccggatgcgacatcaggctcttgtcaaaacggaaacagcatcgggatcatcaccacacaaaccgccatcacgataatggtgaacggtacccccaacttcacaaagtcactgaagctgtaatttcccggacctaaaaccagtgtgttaacaggactagaaaccggtgtcataaaggcggcggatgctgccatcgccacgaccatcgcgaatggataagggctcacccccatcgttttggcagcagccagcgcaatcggagccatcaacaccgccgtcgcggtattagagataaatagcccaataaccgcgctcaagacaaacaaacaccccagcatcatatgtggcccgtaaccaccgccaatgtccatcagccctttcaccgccagcgcgacacctcccgttttctgtaatgccacagcaaacggcatcatcccaacgatcaaaataatgctcggccagtgaatggatttataggcgctttcagcatctatacagcggaatttccccatcagcaggcaggcgatgatagcggcaacaggattaggaatttcatctgtcagcattaacgccaccattagcaccagacagaaaatggcatggggtgcctggctgtgcgcgggacttgcttcactcacctcttccggtaagttcagcgctacgaagtcgcggccctgtttggccagcataccgatcagtttccagttacccacaaccaggatgatatcgcccagcagcagaggctcatccgccaggctaccttccagcgccacgccattgcgctttagccccaccacattcagtccgtagcgggtacgaaaaccaatttcgcgcacgcttttaccaatcagttcactctcaggaattaaactaatctctgccatgcccacatcaagggcctggtcagaaaaatactcgccgcgcagtaccatcggctccagcaattgctcactacaaaattgccggagatcgacatcagccgcagacatatcaataagcaaaacgtcacgcgcgcgaaattcagaaaccccattaacgttcacgataacgcgacgaaaacgccgccagcgttcaacaccgatgacgttagcgccataacgctcacgtaatttgagatcatccagccgttgaccaatcattgggcttccggggcgaatagccagacgtcgcgcacgcccggtcagtcgatattcacggataagatcgcgaaaggttcgacgcgtccagccttcgcgctgcggggtctgggtatcccctttcagcatgaaacgcatcactaacatatacaaaatacccagcaccagcacgaccaggccaataggtgttacgctaaagaaactgaagccgtgatagccttcacgcagcaattcactgttgactaccaggttcggcggcgtcgccaccagcgtcatcatgccgctaatcagcccggcaaaacttaacggcatcatcagacgactcgggctcgtttgcatacgcatggcaacgcttaacaccacgggaataaagatagcgacaacgccggtactactcataaacgcgccaagccccgcgacggtcagcatcaacaaaaccaacattttgatttcactattgcccgcaactttgaccagccatgttcccattacggtggcaacaccggtacggaccaaaccatcgccaataataaacaaggcggcaatcaggacaacgttaggatcagaaaagccggaaaatacttctgggactgtcagcgttccgcttaatgcaaacgcgacaataacaaacaaagcgaccgcatccatacgcactctgcccgtcgcaaacaagacgatggcaacggccagtaaactaagaacccaaatcaattcaccgttcacaacttatccttgttaattgagggggatgacttgattctgccataaaaaagccccgacgagacggggctaaatcatgatcaggtgtttcactgaataataacatcgccatttggctgtttggtcacagtaatttgctccagactgtggaggaccaaatcgacctcattcaggcgcggggtatctgccggagcgttaaccgcaatgacatgacaacccgccgccaggccagaaagcacgccagcgggagcatcttccaccaccacacactcctgcggcgcaagccccagcagctgcgcgcctaacagatacgcatcaggttctggttttccgcgcttcactcgctcagcggttacaaacacctctggtgcgggaagcccagctattttatggcgcgctcgcgctaccggcatggagccagaagtcacaatggcccacggaatacctgctttattcaaatgactgagtaaggcgattgcccccggaagcgcggtaataccttcggtttccgtggcctcgatgtgctccagacgcgtaaactcggcggcaatatcagcctcggatttgcccgccataaaatggcgcagagaggtgatcgcctgtttaccgtgaatgaaagccagcacctcttccggcgctaacccatgacgtctggcccagttgctccacgcccgttctaccgcaggcagggaatccaccagcgttccatcaagatcaaacagaaaacctttgcaccgcacgcgggcctcctcaggcattgataatttgattaatttcgttggcgctcaaatggtactgacgcgggcaggcatgccacacattaagcatgcgctgatatttttcccacattggcgtctgggcgttaaaaccgtgagttccggcgtcaaaatgggtatagcgcccttccacattaaccataaagcggacataaccgaggtaacgtgcttcagtggcggcgtcaaagccgaggaaggtgacacgacgttcatcgatggattgctggtcctgcaaattagaccaggaaacatgcaacgcatgatacatctccataatgtcgatgatagtgcggcaggtttcttctttcagctcgccaaactcgcgatccaattcacgcatctgtaatccgtaaccacgctcaataattgtttgcaggcgacggtaacgttcagcatttgccggatcgagcatagtcatcatcttgtactgattagacaaaataagacgttgcgcgttggtcatttccattgttgactcctgtatcactctactacggtgaaaaaaaagaaggctgagtatgccttcttttatatgcgtaatcaggggtcaattacaaatcatcaaggaaagttttatccagttgtttgaaggcgcgcttaagcgtgtcagctaatgcctggtaatcaggcttgccttcaacgggtgccaacacctgtccagactcctgcaatttaccgcgaacttcataaaaccagttaaggattgcagggggtaatggcgtgacagaacgcttgcccagccaccacaatccctgcatgggtaaacttaaggcgaacagggcagtggcaactgccggcccaagctgaccgcccagggcaatctgccagcagagagtaaatacggcgatcggcggcataaaacggatcgcataacgcgtcatcttgataacgcgattttcgacaaagaccggggcaaggcgtttttccagcggccacgtcttactgtaatgctgtccccggcgaaacaagctaaaaaaattaacagaacgattatccggcgtactcatgcttcacctcaacttcacatataaagattcaaaaatttgtgcaaattcacaactcagcgggacaacgttcaaaacattttgtcttccatacccactatcaggtatcctttagcagcctgaaggcctaagtagtacatattcattgagtcgtcaaattcatatacattatgccattggctgaaaattacgcaaaatggcatagactcaagatatttcttccatcatgcaaaaaaaatttgcagtgcatgatgttaatcataaatgtcggtgtcatcatgcgctacgctctatggctccctgacgtttttttagccacgtatcaattataggtacttccatgagcagtaagttagtactggttctgaactgcggtagttctagtctgaaatttgccatcatcgatgcagtaaatggtgaagagtacctttctggtttagccgaatgtttccacctgcccgaagcacgtatcaaatggaaaatggacggcaataaacaggaagcggctttaggtgcaggcgccgctcacagcgaagcgctcaactttatcgttaatactattctggcacaaaaaccagaactgtctgcgcagctgactgctatcggtcaccgtatcgtacacggcggcgaaaagtataccagctccgtagtgatcgatgagtctgttattcagggtatcaaagatgcagcttcttttgcaccgctgcacaacccggctcacctgatcggtatcgaagaagctctgaaatctttcccacagctgaaagacaaaaacgttgctgtatttgacaccgcgttccaccagactatgccggaagagtcttacctctacgccctgccttacaacctgtacaaagagcacggcatccgtcgttacggcgcgcacggcaccagccacttctatgtaacccaggaagcggcaaaaatgctgaacaaaccggtagaagaactgaacatcatcacctgccacctgggcaacggtggttccgtttctgctatccgcaacggtaaatgcgttgacacctctatgggcctgaccccgctggaaggtctggtcatgggtacccgttctggtgatatcgatccggcgatcatcttccacctgcacgacaccctgggcatgagcgttgacgcaatcaacaaactgctgaccaaagagtctggcctgctgggtctgaccgaagtgaccagcgactgccgctatgttgaagacaactacgcgacgaaagaagacgcgaagcgcgcaatggacgtttactgccaccgcctggcgaaatacatcggtgcctacactgcgctgatggatggtcgtctggacgctgttgtattcactggtggtatcggtgaaaatgccgcaatggttcgtgaactgtctctgggcaaactgggcgtgctgggctttgaagttgatcatgaacgcaacctggctgcacgtttcggcaaatctggtttcatcaacaaagaaggtacccgtcctgcggtggttatcccaaccaacgaagaactggttatcgcgcaagacgcgagccgcctgactgcctgatttcacaccgccagctcagctggcggtgctgttttgtaacccgccaaatcggcggtaacgaaagaggataaaccgtgtcccgtattattatgctgatccctaccggaaccagcgtcggtctgaccagcgtcagccttggcgtgatccgtgcaatggaacgcaaaggcgttcgtctgagcgttttcaaacctatcgctcagccgcgtaccggtggcgatgcgcccgatcagactacgactatcgtgcgtgcgaactcttccaccacgacggccgctgaaccgctgaaaatgagctacgttgaaggtctgctttccagcaatcagaaagatgtgctgatggaagagatcgtcgcaaactaccacgctaacaccaaagacgctgaagtcgttctggttgaaggtctggtcccgacacgtaagcaccagtttgcccagtctctgaactacgaaatcgctaaaacgctgaatgcggaaatcgtcttcgttatgtctcagggcactgacaccccggaacagctgaaagagcgtatcgaactgacccgcaacagcttcggcggtgccaaaaacaccaacatcaccggcgttatcgttaacaaactgaacgcaccggttgatgaacagggtcgtactcgcccggatctgtccgagattttcgacgactcttccaaagctaaagtaaacaatgttgatccggcgaagctgcaagaatccagcccgctgccggttctcggcgctgtgccgtggagctttgacctgatcgcgactcgtgcgatcgatatggctcgccacctgaatgcgaccatcatcaacgaaggcgacatcaatactcgccgcgttaaatccgtcactttctgcgcacgcagcattccgcacatgctggagcacttccgtgccggttctctgctggtgacttccgcagaccgtcctgacgtgctggtggccgcttgcctggcagccatgaacggcgtagaaatcggtgccctgctgctgactggcggttacgaaatggacgcgcgcatttctaaactgtgcgaacgtgctttcgctaccggcctgccggtatttatggtgaacaccaacacctggcagacctctctgagcctgcagagcttcaacctggaagttccggttgacgatcacgaacgtatcgagaaagttcaggaatacgttgctaactacatcaacgctgactggatcgaatctctgactgccacttctgagcgcagccgtcgtctgtctccgcctgcgttccgttatcagctgactgaacttgcgcgcaaagcgggcaaacgtatcgtactgccggaaggtgacgaaccgcgtaccgttaaagcagccgctatctgtgctgaacgtggtatcgcaacttgcgtactgctgggtaatccggcagagatcaaccgtgttgcagcgtctcagggtgtagaactgggtgcagggattgaaatcgttgatccagaagtggttcgcgaaagctatgttggtcgtctggtcgaactgcgtaagaacaaaggcatgaccgaaaccgttgcccgcgaacagctggaagacaacgtggtgctcggtacgctgatgctggaacaggatgaagttgatggtctggtttccggtgctgttcacactaccgcaaacaccatccgtccgccgctgcagctgatcaaaactgcaccgggcagctccctggtatcttccgtgttcttcatgctgctgccggaacaggtttacgtttacggtgactgtgcgatcaacccggatccgaccgctgaacagctggcagaaatcgcgattcagtccgctgattccgctgcggccttcggtatcgaaccgcgcgttgctatgctctcctactccaccggtacttctggtgcaggtagcgacgtagaaaaagttcgcgaagcaactcgtctggcgcaggaaaaacgtcctgacctgatgatcgacggtccgctgcagtacgacgctgcggtaatggctgacgttgcgaaatccaaagcgccgaactctccggttgcaggtcgcgctaccgtgttcatcttcccggatctgaacaccggtaacaccacctacaaagcggtacagcgttctgccgacctgatctccatcgggccgatgctgcagggtatgcgcaagccggttaacgacctgtcccgtggcgcactggttgacgatatcgtctacaccatcgcgctgactgcgattcagtctgcacagcagcagtaatctcgtcatcatccgcagctttgcgctgcggatatctgaaccggaaataatcactatttccggttttttattctcttaatttgcattaatcctttctgattatcttgcttaactgcgctgcatcaatgaattgcgccatcccactttgcatacttaccactttgttttgtgcaagggaatatttgcgctatgtccgcaatcactgaatccaaaccaacaagaagatgggcaatgcccgatacgttggtgattatcttttttgttgctattttaaccagccttgccacctgggtagttccggtggggatgtttgacagtcaggaagtgcagtatcaggttgatggtcaaacaaaaacacgcaaagtcgtagatccacacagttttcgcattctgactaacgaagcaggcgaacctgagtatcaccgcgtacagctgttcacgacgggcgatgaacgcccgggcctgatgaacttcccgtttgaaggattaaccagtggaagcaaatacgggacagccgttggcatcatcatgtttatgctggtgattggcggcgcgtttggcattgtgatgcgtacaggaaccattgataacggtatcctggcgcttattc

(The sequence listing continues in the following parts.)
